(19) United States
(12) Patent Application Publication
(10) Pub. No.: US 2024/0352453 A1
(43) Pub. Date: Oct. 24, 2024

(54) GENOME EDITING COMPOSITIONS AND METHODS FOR TREATMENT OF RETINOPATHY

(71) Applicant: Prime Medicine, Inc., Cambridge, MA (US)

(72) Inventors: Wei Hsi YEH, Cambridge, MA (US); Dewi HARJANTO, Brookline, MA (US)

(21) Appl. No.: 18/584,538

(22) Filed: Feb. 22, 2024

Related U.S. Application Data
(63) Continuation of application No. PCT/US2022/041430, filed on Aug. 24, 2022.
(60) Provisional application No. 63/236,544, filed on Aug. 24, 2021.

(51) Int. Cl. C12N 15/11; C12N 9/12; C12N 9/22

(52) U.S. Cl. CPC C12N 15/111; C12N 9/1276; C12N 9/22; C12N 2310/20

(57) ABSTRACT

Provided herein are compositions and methods of using prime editing systems comprising prime editors and prime editing guide RNAs for treatment of genetic disorders.

### CROSS-REFERENCE

[0001] This application is a continuation of International Application No. PCT/US2022/041430, filed Aug. 24, 2022, which claims the benefit of U.S. Provisional Application No. 63/236,544, filed Aug. 24, 2021, each of which applications are incorporated herein by reference in their entirety.

### SEQUENCE LISTING

[0002] The instant application contains a Sequence Listing which has been submitted electronically in XML format and is hereby incorporated by reference in its entirety. Said XML copy, created on Oct. 26, 2022, is named 59761-744.601_updated.xml and is 8,509,379 bytes in size.

### BACKGROUND

[0003] Non-syndromic retinitis pigmentosa (nsRP) is an autosomal recessive disorder that involves progressive loss of photoreceptors that leads to night blindness and constricted visual field, followed by decline of peripheral and foveal cone populations, eventually resulting in loss of central vision and severe visual impairment in patients.

[0004] Usher syndrome is an autosomal recessive disorder involving dual impairment of the visual and audiovestibular systems and is the most common cause of deaf-blindness. Patients with Usher syndrome often have congenital sensorineural hearing loss with or without vestibular dysfunction, and visual loss in the form of retinitis pigmentosa (RP). Usher syndrome type 2 is the most common form of Usher syndrome accounting for more than 50% of all cases and exhibits a phenotype with moderate-to-severe hearing defects and later onset of RP.

[0005] Mutations in the USH2A gene are a leading cause of retinopathy including nsRP and Usher syndrome type 2. The human USH2A gene is located on the long arm of chromosome 1q41, and codes for multiple usherin isoforms. The usherin isoforms include a short isoform a containing 21 exons leading to a 1546-aa secreted protein, and a very large isoform b with 51 additional exons that is predominant in the retina and the cochlear, giving rise to a 5202-aa matrix protein with a predicted total molecular weight of 570 kDa. The isoform b comprises an intracellular region which interacts with the Usher protein network, a short transmembrane domain and a very long extracellular domain with several motifs associated with extracellular matrix proteins, e.g., laminin and fibronectin repeats. Pathogenic mutations in the USH2A gene include frameshifts and missense mutations that may result in reduced or non-functional usherin protein, and nonsense mutations that results in truncated usherin protein. While patients with Usher type 2 may benefit from hearing aids or cochlear implants to correct their hearing defects, no approved treatments are available for the USH2A-retinopathy.

[0006] This disclosure provides prime editing methods and compositions for correcting mutations associated with USH2A-retinopathy and treatment for USH2A-retinopathy such as nsRP and Usher syndrome.

### SUMMARY OF THE DISCLOSURE

[0007] Provided herein, in some embodiments, are methods and compositions for prime editing of alterations in a target sequence in a target gene, for example, an USH2A gene. The target USH2A gene may comprise double stranded DNA. As exemplified in FIG. 1, in an embodiment, the target gene is edited by prime editing.

[0008] Without wishing to be bound by any particular theory, the prime editing process may search specific targets and edit endogenous sequences in a target gene, e.g., the USH2A gene. As exemplified in FIG. 1, the spacer sequence of a PEgRNA recognizes and anneals with a search target sequence in a target strand of the target gene. A prime editing complex may generate a nick in the target gene on the edit strand which is the complementary strand of the target strand. The prime editing complex may then use a free 3′ end formed at the nick site of the edit strand to initiate DNA synthesis, where a primer binding site (PBS) of the PEgRNA complexes with the free 3′ end, and a single stranded DNA is synthesized using an editing template of the PEgRNA as a template. The editing template may comprise one or more nucleotide edits compared to the endogenous target USH2A gene sequence. Accordingly, the newly-synthesized single stranded DNA also comprises the nucleotide edit(s) encoded by the editing template. Through removal of an editing target sequence on the edit strand of the target gene and DNA repair, the intended nucleotide edit(s) included in the newly synthesized single stranded DNA are incorporated into the target USH2A gene.

[0009] Accordingly, disclosed herein are prime editing guide RNAs (PEgRNAs) comprising: (a) a spacer that is complementary to a search target sequence on a first strand of an USH2a gene. wherein the spacer comprises at its 3′ end a sequence selected from the list consisting of SEQ ID NOs: 618, 469, 1, 1556, 950, 1673, 1733, 1773, 1823, 3102, 3561, 400, 6027, 296, 2099, 7240, 1102, 73, 7459, 1, 55, 141, 296, 382, 469, 513, 734, 763, 643, 932, 1059, 1095, 1164, 1321, 1412, 1895, 2005, 2087, 4496, 4541, 5822, 5864, 5991, and 7084; (b) a gRNA core capable of binding to a Cas9 protein; (c) an extension arm comprising: (i) an editing template that comprises a region of complementarity to an editing target sequence on a second strand of the USH2a gene, and (ii) a primer binding site that comprises at its 5′ end a sequence that is a reverse complement of nucleotides 10-14 of the selected spacer sequence; wherein the first strand and second strand are complementary to each other and wherein the editing target sequence on the second strand comprises or is complementary to a portion of the USH2a gene comprising a c.2276 G>T substitution or a c.2299de1G mutation and wherein the editing template encodes or comprises the wild type amino acid sequence of USH-2a protein at the c.2276 G>T substitution and/or c.2299de1G mutation sites.

[0010] Also disclosed herein are prime editing guide RNAs (PEgR NAs), or nucleic acids encoding the PEgRNAs, comprising: (a) a spacer comprising at its 3′ end a PEgRNA Spacer sequence selected from any one of Tables 1-44; (b) a gRNA core capable of binding to a Cas9 protein, and (c) an extension arm comprising: (i) an editing template comprising at its 3′ end an RTT sequence selected from the same Table as the PEgRNA Spacer sequence, and (ii) a primer binding site (PBS) comprising at its 5′ end a PBS sequence selected from the same Table as the PEgRNA Spacer sequence.

[0011] Some exemplary prime editing guide RNAs (PEgRNAs), or a nucleic acids encoding the PEgRNAs, disclosed herein comprise: (a) a spacer comprising at its 3′ end SEQ ID NO: 5864; (b) a gRNA core capable of binding to a Cas9 protein, and (c) an extension arm comprising: (i) an editing template comprising at its 3′ end SEQ ID NOs: 5869, and (ii) a primer binding site (PBS) comprising at its 5′ end a sequence that is a reverse complement of nucleotides 11-14 of SEQ ID NO: 5864. In some embodiments, the spacer comprises at its 3′ end SEQ ID NO: 5865, 5866, 38, 5867, or 5868. In some embodiments, the spacer comprises at its 3′ end SEQ ID NO: 38. In some embodiments, the editing template comprises at its 3′ end SEQ ID NO: 5869, 5870, 5871, 5872, 5873, 5874, 5875, 5876, 5877, 5878, 5879, 5880, 5881, 5882, 5883, or 5884. In some embodiments, the PBS comprises sequence number 5849, 5850, 5851, 5852, 5853, 5854, 5855, 5856, 5857, 5858, 5859, 5860, 5861, 5862, or 5863. Also disclosed herein are prime editing systems comprising such PEgRNAs or nucleic acids and a ngRNA or nucleic acid encoding the ngRNA comprising: (a) a spacer comprising at its 3′ end a sequence corresponding to nucleotides 4-20 of SEQ ID NO: 4, 58, 1898, 4508, 4509, 4510, 4511, 4512, 2008, 4634, 4635, 1676, 4519, 646, 617, 4522, 3564, 1736, 4640, 2090, 380, 1098, 4525, or 1324; and (b) an ngRNA core capable of binding a Cas9 protein.

[0012] Some prime editing guide RNAs (PEgRNAs), or a nucleic acids encoding the PEgRNAs, disclosed herein comprise: (a) a spacer comprising at its 3′ end SEQ ID NO: 4541: (b) a gRNA core capable of binding to a Cas9 protein, and (c) an extension atm comprising: (i) an editing template comprising at its 3′ end any one of SEQ ID NOs: 4546, 4549, 4550, or 4551, and (ii) a primer binding site (PBS) comprising at its 5′ end a sequence that is a reverse complement of nucleotides 11-14 of SEQ ID NO: 4541. In some embodiments, the spacer comprises at its 3′ end SEQ ID NO: 4542, 4543, 48, 4544, or 4545. In some embodiments, the spacer comprises at its 3′ end SEQ ID NO: 48. In some embodiments, the editing template comprises at its 3′ end SEQ ID NO: 4546, 4547, 4548, 4511, 4553, 4557, 4561, 4565, 4569, 4573, 4577, 4581, 4585, 4589, 4593, 4597, 4601, 4605, 4609, 4613, 4617, 4621, 4625, or 4629. In some embodiments, the editing template comprises at its 3′ end SEQ ID NO: 4549, 4550, 4551, 4552, 4554, 4555, 4556, 4558, 4559, 4560, 4562, 4563, 4564, 4566, 4567, 4568, 4570, 4571, 4572, 4574, 4575, 4576, 4578, 4579, 4580, 4582, 4583, 4584, 4586, 4587, 4588, 4590, 4591, 4592, 4594, 4595, 4596, 4598, 4599, 4600, 4602, 4603, 4604, 4606, 4607, 4608, 4610, 4611, 4612, 4614, 4615, 4616, 4618, 4619, 4620, 4622, 4623, 4624, 4626, 4627, 4628, 4630, or 4631, and wherein the editing template encodes a PAM silencing mutation. In some embodiments, the PBS comprises sequence number 4526, 4527, 4528, 4529, 4530, 4531, 4532, 4533, 4534, 4535, 4536, 4537, 4538, 4539, or 4540. Also disclosed herein are prime editing systems comprising such PEgRNAs or nucleic acids and a ngRNA or nucleic acid encoding the ngRNA: (a) a spacer comprising at its 3′ end a sequence corresponding to nucleotides 4-20 of SEQ ID NO: 4, 58, 1898, 4509, 4510, 4549, 4511, 4550, 4551, 2008, 4634, 4635, 1676, 4519, 646, 4636, 4522, 4637, 4638, 4639, 3564, 1736, 4640, 2090, 380, 1098, or 1324; and (b) an ngRNA core capable of binding a Cas9 protein.

[0013] Some exemplary prime editing guide RNAs (PEgRNAs), or a nucleic acids encoding the PEgRNAs, disclosed herein comprise: (a) a spacer comprising at its 3′ end SEQ ID NO: 2087; (b) a gRNA core capable of binding to a Cas9 protein, and (c) an extension arm comprising: (i) an editing template comprising at its 3′ end any one of SEQ ID NOs: 2093, 2096, 2097, or 2098. and (ii) a primer binding site (PBS) comprising at its 5′ end a sequence that is a reverse complement of nucleotides 11-14 of SEQ ID NO: 2087. In some embodiments, the spacer comprises at its 3′ end SEQ ID NO: 2088, 2089, 2090, 2091, or 2092. In some embodiments, the spacer comprises at its 3′ end SEQ ID NO: 2090. In some embodiments, the editing template comprises at its 3′ end SEQ ID NO: 2093, 2094, 2095, 2099, 2103, 2107, 30, 2114, 2118, 2122, 2126, 2130, 2134, 2138, 2142, 2146, 2150, 2154, 2158, 2162, 2166, 2170, 2174, 2178, 2182, 2186, or 2190. In some embodiments, the editing template comprises at its 3′ end SEQ ID NO: 2096, 2097, 2098, 2100, 2101, 2102, 2104, 2105, 2106, 2108, 2109, 2110, 2111, 2112, 2113, 2115, 2116, 2117, 2119, 2120, 2121, 2123, 2124, 2125, 2127, 2128, 2129, 2131, 2132, 2133, 2135, 2136, 2137, 2139, 2140, 2141, 2143, 2144, 2145, 2147, 2148, 2149, 2151, 2152, 2153, 2155, 2156, 2157, 2159, 2160, 2161, 2163, 2164, 2165, 2167, 2168, 2169, 2171, 2172, 2173, 2175, 2176, 2177, 2179, 2180, 2181, 2183, 2184, 2185, 2187, 2188, or 2189, and wherein the editing template encodes a PAM silencing mutation. In some embodiments, the PBS comprises sequence number 2072, 2073, 2074, 2075, 2076, 2077, 2078, 2079, 2080, 2081, 2082, 2083, 2084, 2085, or 2086. Also disclosed herein are prime editing systems comprising such PEgRNAs or nucleic acids and a ngRNA or nucleic acid encoding the ngRNA; (a) a spacer comprising at its 3′ end a sequence corresponding to nucleotides 4-20 of SEQ ID NO: 30, 31, 33, 34, 138, 35, 36, 139, 37, 38, 39, 41, 43, 44, 140, 48, 49, 51, 52, 53, or 54; and (b) an ngRNA core capable of binding a Cas9 protein.

[0014] Some exemplary prime editing guide RNAs (PEgRNAs), or a nucleic acids encoding the PEgRNAs, disclosed herein comprise: (a) a spacer comprising at its 3′ end SEQ ID NO: 2005; (b) a gRNA core capable of binding to a Cas9 protein, and (c) an extension arm comprising: (i) an editing template comprising at its 3′ end SEQ ID NO: 2011, and (ii) a primer binding site (PBS) comprising at its 5′ end a sequence that is a reverse complement of nucleotides 11-14 of SEQ ID NO: 2005. In some embodiments, the spacer comprises at its 3′ end SEQ ID NO: 2006, 2007, 2008, 2009, or 2010. In some embodiments, the spacer comprises at its 3′ end SEQ ID NO: 2008. In some embodiments, the editing template comprises at its 3′ end SEQ ID NO: 2011, 2012, 2013, 2014, 2015, 2016, 2017, 2018, 2019, 2020, 2021, 2022, 2023, 2024, 2025, 2026, 2027, 2028, 2029, 2030, 2031, 2032, 2033, 2034, 2035, 2036, 2037, 2038, or 2039. In some embodiments, the PBS comprises sequence number 1990, 1991, 1992, 1993, 1994, 1995, 1996, 1997, 1998, 1999, 2000, 2001, 2002, 2003, or 2004. Also disclosed herein are prime editing systems comprising such PEgRNAs or nucleic acids and a ngRNA or nucleic acid encoding the ngRNA: (a) a spacer comprising at its 3′ end a sequence corresponding to nucleotides 4-20 of SEQ ID NO: 2039, 30, 31, 33, 34, 138, 35, 139, 37, 38, 39, 41, 43, 44, 140, 48, 49, 51, 52, 53, or 54; and (b) an ngRNA core capable of binding a Cas9 protein.

[0015] Some exemplary prime editing guide RNAs (PEgRNAs), or a nucleic acids encoding the PEgRNAs. disclosed herein comprise: (a) a spacer comprising at its 3′ end SEQ ID NO: 1895; (b) a gRNA core capable of binding to a Cas9 protein, and (c) an extension arm comprising: (i) an editing template comprising at its 3′ end any one of SEQ ID NOs: 1901 or 1904, and (ii) a primer binding site (PBS) comprising at its 5′ end a sequence that is a reverse complement of nucleotides 11-14 of SEQ ID NO: 1895. In some embodiments, the spacer comprises at its 3′ end SEQ ID NO: 1896, 1897, 1898, 1899, or 1900. In some embodiments, the spacer comprises at its 3′ end SEQ ID NO: 1898. In some embodiments, the editing template comprises at its 3′ end SEQ ID NO: 1901, 1902, 1903, 1905, 1907, 1909, 1911, 1913, 1915, 1917, 1919, 1921, 1923, 1925, 1927, 1929, 1931, 1933, 1935, 1937, 1939, 1941, 1943, 1945, 1947, 1949, 1951, 1953, 1955, or 1957. In some embodiments, the editing template comprises at its 3′ end SEQ ID NO: 1904, 1906, 1908, 1910, 1912, 1914, 1916, 1918, 1920, 1922, 1924, 1926, 1928, 1930, 1932, 1934, 1936, 1938, 1940, 1942, 1944, 1946, 1948, 1950, 1952, 1954, or 1956. and wherein the editing template encodes a PAM silencing mutation. In some embodiments, the PBS comprises sequence number 1880, 1881, 1882, 1883, 1884, 1885, 1886, 1887, 1888, 1889, 1890, 1891, 1892, 1893, or 1894. Also disclosed herein are prime editing systems comprising such PEgRNAs or nucleic acids and a ngRNA or nucleic acid encoding the ngRNA: (a) a spacer comprising at its 3′ end a sequence corresponding to nucleotides 4-20 of SEQ ID NO: 30, 31, 34, 138, 35, 139, 37, 38, 39, 41, 43, 44, 140, 48, 49, 51, 52, 53, or 54; and (b) an ngRNA core capable of binding a Cas9 protein.

[0016] Some exemplary prime editing guide RNAs (PEgRNAs), or a nucleic acids encoding the PEgRNA s, disclosed herein comprise: (a) a spacer comprising at its 3′ end SEQ ID NO: 2099; (b) a gRNA core capable of binding to a Cas9 protein, and (c) an extension arm comprising: (i) an editing template comprising at its 3′ end any one of SEQ ID NOs: 7108, 7110, 7111, or 7112. and (ii) a primer binding site (PBS) comprising at its 5% end a sequence that is a reverse complement of nucleotides 11-14 of SEQ ID NO: 2099. In some embodiments, the spacer comprises at its 3′ end SEQ ID NO: 2103, 2107, 30, 2114, or 2118. In some embodiments, the spacer comprises at its 3′ end SEQ ID NO: 30. In some embodiments, the editing template comprises at its 3′ end SEQ ID NO: 7108, 7109, 2087, 2088, 2089, 2090, 2091, 2092, 7126, 7130, 7134, 7138, 7142, 7146, 7150, 7154, 7158, 7162, 7166, 7170, 7174, 7178, 7182, 7186, 7190, or 7194. In some embodiments, the editing template comprises at its 3′ end SEQ ID NO: 7110, 7111, 7112, 7113, 7114, 7115, 7116, 7117, 7118, 7119, 7120, 7121, 7122, 7123, 7124, 7125, 7127, 7128, 7129, 7131, 7133, 7132, 7135, 7136, 7137, 7139, 7140, 7141, 7143, 7144, 7145, 7147, 7148, 7149, 7151, 7152, 7153, 7155, 7156, 7157, 7159, 7160, 7161, 7163, 7164, 7165, 7167, 7169, 7168, 7171, 7172, 7173, 7175, 7176, 7177, 7179, 7180, 7181, 7183, 7184, 7185, 7187, 7188, 7189, 7191, 7192, 7193, 7195, or 7196, and wherein the editing template encodes a PAM silencing mutation. In some embodiments, the PBS comprises sequence number 7094, 7095, 7096, 7097, 7098, 7099, 7100, 7101, 7102, 322, 7103, 7104, 7105, 7106, or 7107. Also disclosed herein are prime editing systems comprising such PEgRNAs or nucleic acids and a ngRNA or nucleic acid encoding the ngRNA: (a) a spacer comprising at its 3′ end a sequence corresponding to nucleotides 4-20 of SEQ ID NO: 4, 5971, 667, 1898, 1079, 4510, 1657, 2008, 5972, 4634, 4635, 1676, 646, 7197, 379, 7198, 7199, 4639, 3564, 5973, 1736, 4640, 2090, 380, 1098, 1324, or 5975; and (b) an ngRNA core capable of binding a Cas9 protein.

[0017] Some exemplary prime editing guide RNAs (PEgRNAs), or a nucleic acids encoding the PEgRNAs, disclosed herein comprise: (a) a spacer comprising at its 3′ end SEQ ID NO: 6027; (b) a gRNA core capable of binding to a Cas9 protein, and (c) an extension arm comprising: (i) an editing template comprising at its 3′ end any one of SEQ ID NOs: 6032, 6033, 6038, or 6041, and (ii) a primer binding site (PBS) comprising at its 5′ end a sequence that is a reverse complement of nucleotides 11-14 of SEQ ID NO: 6027. In some embodiments, the spacer comprises at its 3′ end SEQ ID NO: 6028, 6029, 33, 6030, or 6031. In some embodiments, the spacer comprises at its 3′ end SEQ ID NO: 33. In some embodiments, the editing template comprises at its 3′ end SEQ ID NO: 6032, 6034, 6036, 6039, 6043, 6047, 6051, 6055, 6059, 6063, 6067, 6071, 6075, 6079, 6083, 6087, 6091, 6099, 6095, 6103, 6107, 6111, 6115, 6119, 6123, 6127, or 6131. In some embodiments, the editing template comprises at its 3′ end SEQ ID NO: 6033, 6035, 6037, 6038, 6040, 6041, 6042, 6044, 6045, 6046, 6048, 6049, 6050, 6052, 6053, 6054, 6056, 6057, 6058, 6060, 6061, 6062, 6064, 6065, 6066, 6068, 6069, 6070, 6072, 6073, 6074, 6076, 6077, 6078, 6080, 6081, 6082, 6084, 6085, 6086, 6088, 6089, 6090, 6092, 6093, 6094, 6096, 6097, 6098, 6100, 6101, 6102, 6104, 6105, 6106, 6108, 6109, 6110, 6112, 6113, 6114, 6116, 6117, 6118, 6120, 6121, 6122, 6124, 6125, 6126, 6128, 6129, 6130, 6132, or 6133, and wherein the editing template encodes a PAM silencing mutation. In some embodiments, the PBS comprises sequence number 6013, 6014, 6015, 6016, 6017, 6018, 6019, 6020, 6021, 6022, 324, 6023, 6024, 6025, or 6026. Also disclosed herein are prime editing systems comprising such PEgRNAs or nucleic acids and a ngRNA or nucleic acid encoding the ngRNA: (a) a spacer comprising at its 3′ end a sequence corresponding to nucleotides 4-20 of SEQ ID NO: 4, 5971, 4510, 6136, 2008, 6137, 6138, 5972, 4634, 4635, 1676, 646, 4639, 3564, 5973, 1736, 4640, 2090, 380, 1098, 1324, or 5975; and (b) an ngRNA core capable of binding a Cas9 protein.

[0018] Any of the PEgRNA disclosed herein can comprise, from 5′ to 3′. the spacer, the gRNA core, the RTT, and the PBS. In some embodiments, the spacer, the gRNA core, the RTT, and the PBS form a contiguous sequence in a single molecule. In some embodiments, the editing template has a length of 44 nucleotides or less, in some embodiments, the editing template has a length of 34 nucleotides or less. In some embodiments, the editing template has a length of 22 nucleotides or less. In some embodiments, the 3′ end of the editing template is adjacent to the 5′ end of the PBS. Some embodiments further comprise 3′ mT*mT*mT*T and 5′mN*mN*mN* modifications, where m indicates that the nucleotide contains a 2′-O-Me modification, a * indicates the presence of a phosphorothioate bond, and a T indicates the presence of an additional uridine nucleotide. Some embodiments further comprise 3′ mN*mN*mN*N and 5′mN*mN*mN* modifications, where m indicates that the nucleotide contains a 2′-O-Me modification and a * indicates the presence of a phosphorothioate bond.

[0019] Any of the prime editing systems disclosed herein can further comprise (c) a prime editor comprising a Cas9 nickase having a nuclease inactivating mutation in the HNH domain, or a nucleic acid encoding the Cas9 nickase, and a reverse transcriptase, or a nuclei acid encoding the reverse transcriptase. In some embodiments, the prime editor is a fusion protein.

[0020] Any of the prime editing systems disclosed herein can further comprise (c) an N-terminal extein comprising an N-terminal fragment of a prime editor fusion protein and an N-intein or a polynucleotide encoding the N-terminal extein; and (d) a C-terminal extein comprising a C-terminal fragment of the prime editor fusion protein and a C-intein, or a polynucleotide encoding the C-terminal extein; wherein the N-intein and the C-intein of the N-terminal and C-terminal exteins are capable of self-excision to join the N-terminal fragment and the C-terminal fragment to form the prime editor fusion protein, and wherein the prime editor fusion protein comprises a Cas9 nickase and a reverse transcriptase (RT) domain.

[0021] Also disclosed herein are LNPs, viral vectors and populations of viral particles for delivering the PEgRNA and prime editing systems disclosed herein.

[0022] Also disclosed herein are methods for editing an USH2a gene using the PEgRNA and prime editing systems disclosed herein.

[0023] Also disclosed herein are methods for treating Usher syndrome and/or nsRP in subjects in need thereof with the PEgRNA, prime editing systems, LNPs, and viral vectors disclosed herein.

### INCORPORATION BY REFERENCE

[0024] All publications, patents, and patent applications mentioned in this specification are herein incorporated by reference to the same extent as if each individual publication, patent, or patent application was specifically and individually indicated to be incorporated by reference.

### BRIEF DESCRIPTION OF THE DRAWINGS

[0025] The novel features of the disclosure are set forth with particularity in the appended claims. A better understanding of the features and advantages of the present disclosure will be obtained by reference to the following detailed description that sets forth illustrative embodiments, in which the principles of the disclosure are utilized, and the accompanying drawings of which:

[0026] FIG. 1 depicts a schematic of a prime editing guide RNA (PEgRNA) binding to a double stranded target DNA sequence.

[0027] FIG. 2 depicts a PEgRNA architectural overview in an exemplary schematic of PEgRNA designed for a prime editor.

[0028] FIG. 3 is a schematic showing the spacer and gRNA core part of an exemplary guide RNA, in two separate molecules. The rest of the PEgRNA structure is not shown.

### DETAILED DESCRIPTION OF THE DISCLOSURE

[0029] Provided herein, in some embodiments, are compositions and methods to edit the target gene USH2A with prime editing. In certain embodiments, provided herein are compositions and methods for correction of mutations in the USH2A gene associated with non-syndromic retinitis pigmentosa (nsRP). In certain embodiments, provided herein are compositions and methods for correction of mutations in the USH2A gene associated with Usher syndrome. Compositions provided herein can comprise prime editors (PEs) that may use engineered guide polynucleotides, e.g., prime editing guide RNAs (PEgRNAs), that can direct PEs to specific DNA targets and can encode DNA edits on the target gene USH2A that serve a variety of functions, including direct correction of disease-causing mutations.

[0030] The following description and examples illustrate embodiments of the present disclosure in detail. It is to be understood that this disclosure is not limited to the particular embodiments described herein and as such can vary. Those of skill in the art will recognize that there are numerous variations and modifications of this disclosure, which are encompassed within its scope. Although various features of the present disclosure can be described in the context of a single embodiment, the features can also be provided separately or in any suitable combination. Conversely, although the present disclosure can be described herein in the context of separate embodiments for clarity, the present disclosure can also be implemented in a single embodiment.

### Definitions

[0031] Unless defined otherwise, all technical and scientific terms used herein have the same meaning as is commonly understood by one of ordinary skill in the art.

[0032] The terminology used herein is for the purpose of describing particular embodiments only and is not intended to be limiting. As used herein, the singular forms “a”, “an” and “the” are intended to include the plural forms as well, unless the context clearly indicates otherwise. Furthermore, to the extent that the terms “including”, “includes”, “having”, “has”, “with”, or variants thereof as used herein mean “comprising”.

[0033] Unless otherwise specified, the words “comprising”, “comprise”, “comprises”, “having”, “have”, “has”, “including”, “includes”, “include”, “containing”, “contains” and “contain” are inclusive or open-ended and do not exclude additional, unrecited elements or method steps.

[0034] Reference to “some embodiments”, “an embodiment”, “one embodiment”, or “other embodiments” means that a particular feature or characteristic described in connection with the embodiments is included in at least one or more embodiments, but not necessarily all embodiments, of the present disclosure.

[0035] The term “about” or “approximately” in relation to a numerical value means a range of values that fall within 10% greater than or 10% less than the value. For example, about x means x+(10% * x).

[0036] As used herein, a “cell” can generally refer to a biological cell. A cell can be the basic structural, functional and/or biological unit of a living organism. A cell can originate from any organism having one or more cells. Some non-limiting examples include: a prokaryotic cell, eukaryotic cell, a bacterial cell, an archaeal cell, a cell of a single-cell eukaryotic organism, a protozoa cell, a cell from a plant, an animal cell, a cell from an invertebrate animal (e.g. fruit fly, cnidarian, echinoderm, nematode, etc.), a cell from a vertebrate animal (e.g., fish, amphibian, reptile, bird, mammal), a cell from a mammal (e.g., a pig, a cow, a goat, a sheep, a rodent, a rat, a mouse, a non-human primate, a human, etc.), et cetera. Sometimes a cell may not originate from a natural organism (e.g., a cell can be synthetically made, sometimes termed an artificial cell).

[0037] In some embodiments, the cell is a human cell. A cell may be of or derived from different tissues, organs, and/or cell types. In some embodiments, the cell is a primary cell. In some embodiments, the term “primary cell” means a cell isolated from an organism, e.g., a mammal, which is grown in tissue culture (i.e., in vitro) for the first time before subdivision and transfer to a subculture. In some non-limiting examples, mammalian cells, including primary cells and stem cells, can be modified through introduction of one or more polynucleotides, polypeptide, and/or prime editing compositions (e.g., through transfection, transduction, electroporation and the like) and further passaged. Such modified mammalian primary cells include retinal cells (photoreceptors, retinal pigment epithelium cells, epithelial cells (e.g., mammary epithelial cells, intestinal epithelial cells, hepatocytes), endothelial cells, glial cells, neural cells, formed elements of the blood (e.g., lymphocytes, bone marrow cells), precursors of any of these somatic cell types, and stem cells. In some embodiments, the cell is a stem cell. In some embodiments, the cell is a human progenitor cell. In some embodiments, the cell is a pluripotent cell (e.g., a pluripotent stem cell). In some embodiments, the cell (e.g., a stem cell) is an embryonic stem cell, tissue-specific stem cell, mesenchymal stem cell, or an induced pluripotent stem cell. In some embodiments, the cell is an induced pluripotent stem cell (iPSC). In some embodiments, the cell is an embryonic stem cell (ESC). In some embodiments, the cell is an induced human pluripotent stem cell (iPSC). In some embodiments, the cell is a human stem cell. In some embodiments, the cell is a human embryonic stem cell.

[0038] In some embodiments, a cell is not isolated from an organism but forms part of a tissue or organ of an organism, e.g., a mammal. In some non-limiting examples, mammalian cells include epithelial cells (e.g., mammary epithelial cells, intestinal epithelial cells, hepatocytes), endothelial cells, glial cells, neural cells, formed elements of the blood (e.g., lymphocytes, bone marrow cells), precursors of any of these somatic cell types, and stem cells. In some embodiments, the cell is a sensory ciliated cell. In some embodiments, the cell is a retinal cell. In some embodiments, the cell is a photoreceptor cell. In some embodiments, the cell is a rod cell. In some embodiments, the cell is a cone cell. In some embodiments, the cell is a hair cell. In some embodiments, the cell is a post-natal hair cell. In some embodiments, the cell is a human sensory ciliated cell. In some embodiments, the cell is a human retinal cell. In some embodiments, the cell is a human photoreceptor cell. In some embodiments, the cell is a human rod cell. In some embodiments, the cell is a human cone cell. In some embodiments, the cell is a human hair cell. In some embodiments, the cell is a human post-natal hair cell

[0039] In some embodiments, the cell is a differentiated cell. In some embodiments, cell is a fibroblast. In some embodiments, the cell is differentiated from an induced pluripotent stem cell (iPSC). In some embodiments, the cell is differentiated from an embryonic stem cell (ESC). In some embodiments, the cell is differentiated from a keratinocyte. In some embodiments, the cell is differentiated from a human keratinocyte. In some embodiments, the cell is differentiated from a human induced pluripotent stem cell (hiPSC). In some embodiments, the cell is differentiated from a human ESC. In some embodiments, the cell is a differentiated retinal cell. In some embodiments, the cell is a photoreceptor cell, a rod cell, or a cone cell derived from an iPSC. In some embodiments, the cell is a hair cell derived from an iPSC. In some embodiments, the cell is a photoreceptor cell, a rod cell, or a cone cell derived from a hiPSC. In some embodiments, the cell is a hair cell derived from a hiPSC. In some embodiments, the cell is a photoreceptor cell, a rod cell, or a cone cell derived from an ESC. In some embodiments, the cell is a hair cell derived from an ESC. In some embodiments, the cell is a differentiated human cell. In some embodiments, the cell is a human fibroblast. In some embodiments, a human retinal cell is differentiated from a human iPSC or human ESC. In some embodiments, a human hair cell is differentiated from a human iPSC or human ESC.

[0040] In some embodiments, the cell comprises a prime editor, a PEgRNA, or a prime editing composition disclosed herein. In some embodiments, the cell further comprises an ngRNA. In some embodiments, the cell is from a human subject. In some embodiments, the human subject has a disease or condition, or is at a risk of developing a disease or a condition associated with a mutation to be corrected by prime editing, for example, nsRP or Usher syndrome. In some embodiments, the cell is from a human subject, and comprises a prime editor or a prime editing composition for correction of the mutation. In some embodiments, the cell is from the human subject and the mutation has been edited or corrected by prime editing. In some embodiments, the cell is in a human subject, and comprises a prime editor, a PEgRNA, or a prime editing composition for correction of the mutation. In some embodiments, the cell is from the human subject and the mutation has been edited or corrected by prime editing. In some embodiments, the cell is in a subject, e.g., a human subject. In some embodiments, the cell is obtained from a subject prior to editing. For example, the cell is obtained from a subject having a mutation in the USH2A gene.

[0041] The term “substantially” as used herein may refer to a value approaching 100% of a given value. In some embodiments, the term may refer to an amount that may be at least about 70%, 80%, 90%, 91%, 92%, 93%, 94%, 95%, 96%, 97%, 98%, 99%, 99.9%, or 99.99% of a total amount. In some embodiments, the term may refer to an amount that may be about 100% of a total amount.

[0042] The terms “protein” and “polypeptide” can be used interchangeably to refer to a polymer of two or more amino acids joined by covalent bonds (e.g., an amide bond) that can adopt a three-dimensional conformation. In some embodiments, a protein or polypeptide comprises at least 10 amino acids, 15 amino acids, 20 amino acids, 30 amino acids or 50 amino acids joined by covalent bonds (e.g., amide bonds). In some embodiments, a protein comprises at least two amide bonds. In some embodiments, a protein comprises multiple amide bonds. In some embodiments, a protein comprises an enzyme, enzyme precursor proteins, regulatory protein, structural protein, receptor, nucleic acid binding protein, a biomarker, a member of a specific binding pair (e.g., a ligand or aptamer), or an antibody. In some embodiments, a protein may be a full-length protein (e.g., a fully processed protein having certain biological function). In some embodiments, a protein may be a variant or a fragment of a full-length protein. For example, in some embodiments, a Cas9 protein domain comprises an H840A amino acid substitution compared to a naturally occurring S. pyogenes Cas9 protein. A variant of a protein or enzyme, for example a variant reverse transcriptase, comprises a polypeptide having an amino acid sequence that is about 60% identical, about 70% identical, about 80% identical, about 90% identical, about 95% identical, about 96% identical, about 97% identical, about 98% identical, about 99% identical, about 99.5% identical, or about 99.9% identical to the amino acid sequence of a reference protein.

[0043] In some embodiments, a protein comprises one or more protein domains or subdomains. As used herein, the term “polypeptide domain”, “protein domain”, or “domain” when used in the context of a protein or polypeptide, refers to a polypeptide chain that has one or more biological functions, e.g., a catalytic function, a protein-protein binding function, or a protein-DNA function. In some embodiments, a protein comprises multiple protein domains. In some embodiments, a protein comprises multiple protein domains that are naturally occurring. In some embodiments, a protein comprises multiple protein domains from different naturally occurring proteins. For example, in some embodiments, a prime editor may be a fusion protein comprising a Cas9 protein domain of S. pyogenes and a reverse transcriptase protein domain of a retrovirus (e.g., a Moloney murine leukemia virus) or a variant of the retrovirus. A protein that comprises amino acid sequences from different origins or naturally occurring proteins may be referred to as a fusion, or chimeric protein.

[0044] In some embodiments, a protein comprises a functional variant or functional fragment of a full-length wild type protein. A “functional fragment” or “functional portion”, as used herein, refers to any portion of a reference protein (e.g., a wild type protein) that encompasses less than the entire amino acid sequence of the reference protein while retaining one or more of the functions, e.g., catalytic or binding functions. For example, a functional fragment of a reverse transcriptase may encompass less than the entire amino acid sequence of a wild type reverse transcriptase, but retains the ability under at least one set of conditions to catalyze the polymerization of a polynucleotide. When the reference protein is a fusion of multiple functional domains, a functional fragment thereof may retain one or more of the functions of at least one of the functional domains. For example, a functional fragment of a Cas9 may encompass less than the entire amino acid sequence of a wild type Cas9, but retains its DNA binding ability and lacks its nuclease activity partially or completely.

[0045] A “functional variant” or “functional mutant”, as used herein, refers to any variant or mutant of a reference protein (e.g., a wild type protein) that encompasses one or more alterations to the amino acid sequence of the reference protein while retaining one or more of the functions, e.g., catalytic or binding functions. In some embodiments, the one or more alterations to the amino acid sequence comprises amino acid substitutions, insertions or deletions, or any combination thereof. In some embodiments, the one or more alterations to the amino acid sequence comprises amino acid substitutions. For example, a functional variant of a reverse transcriptase may comprise one or more amino acid substitutions compared to the amino acid sequence of a wild type reverse transcriptase, but retains the ability under at least one set of conditions to catalyze the polymerization of a polynucleotide. When the reference protein is a fusion of multiple functional domains, a functional variant thereof may retain one or more of the functions of at least one of the functional domains. For example, in some embodiments, a functional fragment of a Cas9 may comprise one or more amino acid substitutions in a nuclease domain, e.g., an H840A amino acid substitution, compared to the amino acid sequence of a wild type Cas9, but retains the DNA binding ability and lacks the nuclease activity partially or completely.

[0046] The term “function” and its grammatical equivalents as used herein may refer to a capability of operating, having, or serving an intended purpose. Functional may comprise any percent from baseline to 100% of an intended purpose. For example, functional may comprise or comprise about 5%, 10%, 15%, 20%, 25%, 30%, 35%, 40%, 45%, 50%, 55%, 60%, 65%, 70%, 75%, 80%, 85%, 90%, 95%, or up to about 100% of an intended purpose. In some embodiments, the term functional may mean over or over about 100% of normal function, for example, 125%, 150%, 175%, 200%, 250%, 300%, 400%, 500%, 600%, 700% or up to about 1000% of an intended purpose.

[0047] In some embodiments, a protein or polypeptides includes naturally occurring amino acids (e.g., one of the twenty amino acids commonly found in peptides synthesized in nature, and known by the one letter abbreviations A, R, N, C, D, Q, E, G, H, I, L, K, M, F, P, S, T, W, Y and V). In some embodiments, a protein or polypeptides includes non-naturally occurring amino acids (e.g., amino acids which is not one of the twenty amino acids commonly found in peptides synthesized in nature, including synthetic amino acids, amino acid analogs, and amino acid mimetics). In some embodiments, a protein or polypeptide is modified.

[0048] In some embodiments, a protein comprises an isolated polypeptide. The term “isolated” means free or removed to varying degrees from components which normally accompany it as found in the natural state or environment. For example, a polypeptide naturally present in a living animal is not isolated, and the same polypeptide partially or completely separated from the coexisting materials of its natural state is isolated.

[0049] In some embodiments, a protein is present within a cell, a tissue, an organ, or a virus particle. In some embodiments, a protein is present within a cell or a part of a cell (e.g., a bacteria cell, a plant cell, or an animal cell). In some embodiments, the cell is in a tissue, in a subject, or in a cell culture. In some embodiments, the cell is a microorganism (e.g., a bacterium, fungus, protozoan, or virus). In some embodiments, a protein is present in a mixture of analytes (e.g., a lysate). In some embodiments, the protein is present in a lysate from a plurality of cells or from a lysate of a single cell.

[0050] The terms “homologous,” “homology,” or “percent homology” as used herein refer to the degree of sequence identity between an amino acid and a corresponding reference amino acid sequence or a polynucleotide sequence and a corresponding reference polynucleotide sequence. “Homology” can refer to polymeric sequences, e.g., polypeptide or DNA sequences that are similar. Homology can mean, for example, nucleic acid sequences with at least about: 50%, 55%, 60%, 65%, 70%, 75%, 80%, 81%, 82%, 83%, 84%, 85%, 86%, 87%, 88%, 89%, 90%, 91%, 92%, 93%, 94%, 95%, 96%, 97%, 98%, 99%, or 100% identity. In other embodiments, a “homologous sequence” of nucleic acid sequences may exhibit 93%, 95% or 98% sequence identity to the reference nucleic acid sequence. For example, a “region of homology to a genomic region” can be a region of DNA that has a similar sequence to a given genomic region in the genome. A region of homology can be of any length that is sufficient to promote binding of a spacer, primer binding site or protospacer sequence to the genomic region. For example, the region of homology can comprise at least 5, 10, 11, 12, 13, 14, 15, 16, 17, 18, 19, 20, 21, 22, 23, 24, 25, 30, 35, 40, 45, 50, 55, 60, 65, 70, 75, 80, 85, 90, 95, 100, 200, 300, 400, 500, 600, 700, 800, 900, 1000, 1100, 1200, 1300, 1400, 1500, 1600, 1700, 1800, 1900, 2000, 2100, 2200, 2300, 2400, 7576, 2600, 2700, 2800, 2900, 3000, 3100 or more bases in length such that the region of homology has sufficient homology to undergo binding with the corresponding genomic region.

[0051] When a percentage of sequence homology or identity is specified, in the context of two nucleic acid sequences or two polypeptide sequences, the percentage of homology or identity generally refers to the alignment of two or more sequences across a portion of their length when compared and aligned for maximum correspondence. When a position in the compared sequence can be occupied by the same base or amino acid, then the molecules can be homologous at that position. Unless stated otherwise, sequence homology or identity is assessed over the specified length of the nucleic acid, polypeptide or portion thereof. In some embodiments, the homology or identity is assessed over a functional portion or specified portion of the length.

[0052] Alignment of sequences for assessment of sequence homology can be conducted by algorithms known in the art, such as the Basic Local Alignment Search Tool (BLAST) algorithm, which is described in Altschul et al, J. Mol. Biol. 215:403-410, 1990. A publicly available, internet interface, for performing BLAST analyses is accessible through the National Center for Biotechnology Information. Additional known algorithms include those published in: Smith & Waterman, “Comparison of Biosequences”, Adv. Appl. Math. 2:482, 1981; Needleman & Wunsch, “A general method applicable to the search for similarities in the amino acid sequence of two proteins” J. Mol. Biol. 48:443, 1970; Pearson & Lipman “Improved tools for biological sequence comparison”, Proc. Natl. Acad. Sci. USA 85:2444, 1988; or by automated implementation of these or similar algorithms. Global alignment programs may also be used to align similar sequences of roughly equal size. Examples of global alignment programs include NEEDLE (available at www.ebi.ac.uk/Tools/psa/emboss_needle/) which is part of the EMBOSS package (Rice P et al., Trends Genet., 2000; 16: 276-277), and the GGSEARCH program https://fasta.bioch.virginia.edu/fasta_www2/, which is part of the FASTA package (Pearson W and Lipman D, 1988, Proc. Natl. Acad. Sci. USA, 85: 2444-2448). Both of these programs are based on the Needleman-Wunsch algorithm which is used to find the optimum alignment (including gaps) of two sequences along their entire length. A detailed discussion of sequence analysis can also be found in Unit 19.3 of Ausubel et al (“Current Protocols in Molecular Biology” John Wiley & Sons Inc, 1994-1998, Chapter 15, 1998). In some embodiments, alignment between a query sequence and a reference sequence is performed with Needleman-Wunsch alignment with Gap Costs set to Existence: 11 Extension: 1 where percent identity is calculated by dividing the number of identities by the length of the alignment, as further described in Altschul et al. (“Gapped BLAST and PSI-BLAST: a new generation of protein database search programs”, Nucleic Acids Res. 25:3389-3402, 1997) and Altschul et al, (“Protein database searches using compositionally adjusted substitution matrices”, FEBS J. 272:5101-5109, 2005).

[0053] A skilled person understands that amino acid (or nucleotide) positions may be determined in homologous sequences based on alignment, for example, “H840” in a reference Cas9 sequence may correspond to H839, or another position in a Cas9 homolog.

[0054] The term “polynucleotide” or “nucleic acid molecule” can be any polymeric form of nucleotides, including DNA, RNA, a hybridization thereof, or RNA-DNA chimeric molecules. In some embodiments, a polynucleotide comprises cDNA, genomic DNA, mRNA, tRNA, rRNA, or microRNA. In some embodiments, a polynucleotide is double stranded, e.g., a double-stranded DNA in a gene. In some embodiments, a polynucleotide is single-stranded or substantially single-stranded, e.g., single-stranded DNA or an mRNA. In some embodiments, a polynucleotide is a cell-free nucleic acid molecule. In some embodiments, a polynucleotide circulates in blood. In some embodiments, a polynucleotide is a cellular nucleic acid molecule. In some embodiments, a polynucleotide is a cellular nucleic acid molecule in a cell circulating in blood.

[0055] Polynucleotides can have any three-dimensional structure. The following are nonlimiting examples of polynucleotides: a gene or gene fragment (for example, a probe, primer, EST or SAGE tag), an exon, an intron, intergenic DNA (including, without limitation, heterochromatic DNA), messenger RNA (mRNA), transfer RNA (tRNA), ribosomal RNA (rRNA), a ribozyme, cDNA, a recombinant polynucleotide, a branched polynucleotide, a plasmid, a vector, isolated DNA, isolated RNA, sgRNA, guide RNA, a nucleic acid probe, a primer, an snRNA, a long non-coding RNA, a snoRNA, a siRNA, a miRNA, a tRNA-derived small RNA (tsRNA), an antisense RNA, an shRNA, or a small rDNA-derived RNA (srRNA).

[0056] In some embodiments, a polynucleotide comprises deoxyribonucleotides, ribonucleotides or analogs thereof. In some embodiments, a polynucleotide comprises modified nucleotides, such as methylated nucleotides and nucleotide analogs. If present, modifications to the nucleotide structure can be imparted before or after assembly of the polynucleotide. The sequence of nucleotides can be interrupted by non-nucleotide components. A polynucleotide can be further modified after polymerization, such as by conjugation with a labeling component.

[0057] In some embodiments, a polynucleotide is composed of a specific sequence of four nucleotide bases: adenine (A); cytosine (C); guanine (G); thymine (T); and uracil (U) for thymine when the polynucleotide is RNA. In some embodiments, the polynucleotide may comprise one or more other nucleotide bases, such as inosine (I), which is read by the translation machinery as guanine (G).

[0058] In some embodiments, a polynucleotide may be modified. As used herein, the terms “modified” or “modification” refers to chemical modification with respect to the A, C, G, T and U nucleotides. In some embodiments, modifications may be on the nucleoside base and/or sugar portion of the nucleosides that comprise the polynucleotide. In some embodiments, the modification may be on the internucleoside linkage (e.g., phosphate backbone). In some embodiments, multiple modifications are included in the modified nucleic acid molecule. In some embodiments, a single modification is included in the modified nucleic acid molecule.

[0059] The term “complement”, “complementary”, or “complementarity” as used herein, refers to the ability of two polynucleotide molecules to base pair with each other. Complementary polynucleotides may base pair via hydrogen bonding, which may be Watson Crick, Hoogsteen or reversed Hoogsteen hydrogen bonding. For example, an adenine on one polynucleotide molecule will base pair to a thymine or a uracil on a second polynucleotide molecule and a cytosine on one polynucleotide molecule will base pair to a guanine on a second polynucleotide molecule. Two polynucleotide molecules are complementary to each other when a first polynucleotide molecule comprising a first nucleotide sequence can base pair with a second polynucleotide molecule comprising a second nucleotide sequence. For instance, the two DNA molecules 5′-ATGC-3′ and 5′-GCAT-3′ are complementary, and the complement of the DNA molecule 5′-ATGC-3′ is 5′-GCAT-3′. A percentage of complementarity indicates the percentage of nucleotides in a polynucleotide molecule which can base pair with a second polynucleotide molecule (e.g., 5, 6, 7, 8, 9, 10 out of 10 being 50%, 60%, 70%, 80%, 90%, and 100% complementary, respectively). “Perfectly complementary” means that all the contiguous nucleotides of a polynucleotide molecule will base pair with the same number of contiguous nucleotides in a second polynucleotide molecule. “Substantially complementary” as used herein refers to a degree of complementarity that can be 70%, 75%, 80%, 85%, 90%, 95%, 97%, 98%, or 99% over all or a portion of two polynucleotide molecules. In some embodiments, the portion of complementarity may be a region of 10, 15, 20, 25, 30, 35, 40, 45, 50, or more nucleotides. “Substantial complementary” can also refer to a 100% complementarity over a portion or a region of two polynucleotide molecules. In some embodiments, the portion or the region of complementarity between the two polynucleotide molecules is at least 60%, 65%, 70%, 75%, 80%, 85%, 90%, 95%, 97%, 98%, or 99% of the length of at least one of the two polynucleotide molecules or a functional or defined portion thereof.

[0060] As used herein, “expression” refers to the process by which polynucleotides are transcribed into mRNA and/or the process by which polynucleotides, e.g., the transcribed mRNA translated into peptides, polypeptides, or proteins. If the polynucleotide is derived from genomic DNA, expression may include splicing of the mRNA in a eukaryotic cell. In some embodiments, expression of a polynucleotide, e.g., a gene or a DNA encoding a protein, is determined by the amount of the protein encoded by the gene after transcription and translation of the gene. In some embodiments, expression of a polynucleotide, e.g., a gene or a DNA encoding a protein, is determined by the amount of a functional form of the protein encoded by the gene after transcription and translation of the gene. In some embodiments, expression of a gene is determined by the amount of the mRNA, or transcript, that is encoded by the gene after transcription the gene. In some embodiments, expression of a polynucleotide, e.g., an mRNA, is determined by the amount of the protein encoded by the mRNA after translation of the mRNA. In some embodiments, expression of a polynucleotide, e.g., a mRNA or coding RNA, is determined by the amount of a functional form of the protein encoded by the polypeptide after translation of the polynucleotide.

[0061] The terms “equivalent” or “biological equivalent” are used interchangeably when referring to a particular molecule, or biological or cellular material, and means a molecule having minimal homology to another molecule while still maintaining a desired structure or functionality.

[0062] The term “encode” as it is applied to polynucleotides refers to a polynucleotide which is said to “encode” another polynucleotide, a polypeptide, or an amino acid if, in its native state or when manipulated by methods well known to those skilled in the art, it can be used as polynucleotide synthesis template, e.g., transcribed into an RNA, reverse transcribed into a DNA or cDNA, and/or translated to produce an amino acid, or a polypeptide or fragment thereof. In some embodiments, a polynucleotide comprising three contiguous nucleotides form a codon that encodes a specific amino acid. In some embodiments, a polynucleotide comprises one or more codons that encode a polypeptide. In some embodiments, a polynucleotide comprising one or more codons comprises a mutation in a codon compared to a wild-type reference polynucleotide. In some embodiments, the mutation in the codon encodes an amino acid substitution in a polypeptide encoded by the polynucleotide as compared to a wild-type reference polypeptide.

[0063] The term “mutation” as used herein refers to a change and/or alteration in an amino acid sequence of a protein or nucleic acid sequence of a polynucleotide. Such changes and/or alterations may comprise the substitution, insertion, deletion and/or truncation of one or more amino acids, in the case of an amino acid sequence, and/or nucleotides, in the case of nucleic acid sequence, compared to a reference amino acid or a reference nucleic acid sequence. In some embodiments, the reference sequence is a wild-type sequence. In some embodiments, a mutation in a nucleic acid sequence of a polynucleotide encodes a mutation in the amino acid sequence of a polypeptide. In some embodiments, the mutation in the amino acid sequence of the polypeptide or the mutation in the nucleic acid sequence of the polynucleotide is a mutation associated with a disease state.

[0064] The term “subject” and its grammatical equivalents as used herein may refer to a human or a non-human. A subject may be a mammal. A human subject may be male or female. A human subject may be of any age. A subject may be a human embryo. A human subject may be a newborn, an infant, a child, an adolescent, or an adult. A human subject may be in need of treatment for a genetic disease or disorder.

[0065] The terms “treatment” or “treating” and their grammatical equivalents may refer to the medical management of a subject with an intent to cure, ameliorate, or ameliorate a symptom of, a disease, condition, or disorder. Treatment may include active treatment, that is, treatment directed specifically toward the improvement of a disease, condition, or disorder. Treatment may include causal treatment, that is, treatment directed toward removal of the cause of the associated disease, condition, or disorder. In addition, this treatment may include palliative treatment, that is, treatment designed for the relief of symptoms rather than the curing of the disease, condition, or disorder. Treatment may include supportive treatment, that is, treatment employed to supplement another specific therapy directed toward the improvement of the disease, condition, or disorder. In some embodiments, a condition may be pathological. In some embodiments, a treatment may not completely cure or prevent a disease, condition, or disorder. In some embodiments, a treatment ameliorates, but does not completely cure or prevent a disease, condition, or disorder. In some embodiments, a subject may be treated for 12 hours, 24 hours, 2 days, 3 days, 4 days, 5 days, 6 days, 7 days, 2 weeks, 3 weeks, 4 weeks, 2 months, 3 months, 4 months, 5 months, 6 months, 1 year, 2 years, 3 years, 4 years, 5 years, 6 years, indefinitely, or life of the subject.

[0066] The term “ameliorate” and its grammatical equivalents means to decrease, suppress, attenuate, diminish, arrest, or stabilize the development or progression of a disease.

[0067] The terms “prevent” or “preventing” means delaying, forestalling, or avoiding the onset or development of a disease, condition, or disorder for a period of time. Prevent also means reducing risk of developing a disease, disorder, or condition. Prevention includes minimizing or partially or completely inhibiting the development of a disease, condition, or disorder. In some embodiments, a composition, e.g., a pharmaceutical composition, prevents a disorder by delaying the onset of the disorder for 12 hours, 24 hours, 2 days, 3 days, 4 days, 5 days, 6 days, 7 days, 2 weeks, 3 weeks, 4 weeks, 2 months, 3 months, 4 months, 5 months, 6 months, 1 year, 2 years, 3 years, 4 years, 5 years, 6 years, indefinitely, or life of a subject.

[0068] The term “effective amount” or “therapeutically effective amount” refers to a quantity of a composition, for example a prime editing composition comprising a construct, that can be sufficient to result in a desired activity upon introduction into a subject as disclosed herein. An effective amount of the prime editing compositions can be provided to the target gene or cell, whether the cell is ex vivo or in vivo. An effective amount can be the amount to induce, for example, at least about a 2-fold change (increase or decrease) or more in the amount of target nucleic acid modulation (e.g., expression of a USH2A gene to produce functional usherin protein) observed relative to a negative control. An effective amount or dose can induce, for example, about 2-fold increase, about 3-fold increase, about 4-fold increase, about 5-fold increase, about 6-fold increase, about 7-fold increase, about 8-fold increase, about 9-fold increase, about 10-fold increase, about 25-fold increase, about 50-fold increase, about 100-fold increase, about 200-fold increase, about 500-fold increase, about 700-fold increase, about 1000-fold increase, about 5000-fold increase, or about 10,000-fold increase in target gene modulation (e.g., expression of a target USH2A gene to produce functional usherin protein).

[0069] The amount of target gene modulation may be measured by any suitable method known in the art. In some embodiments, the “effective amount” or “therapeutically effective amount” is the amount of a composition that is required to ameliorate the symptoms of a disease relative to an untreated patient. In some embodiments, an effective amount is the amount of a composition sufficient to introduce an alteration in a gene of interest in a cell (e.g., a cell in vitro or in vivo).

[0070] In some embodiments, an effective amount can be an amount to induce, when administered to a population of cells, at least about 2-fold increase, about 3-fold increase, about 4-fold increase, about 5-fold increase, about 6-fold increase, about 7-fold increase, about 8-fold increase, about 9-fold increase, about 10-fold increase, about 25-fold increase, about 50-fold increase, about 100-fold increase, about 200-fold increase, about 500-fold increase, about 700-fold increase, about 1000-fold increase, about 5000-fold increase, or about 10,000-fold increase in the number of cells that have an intended nucleotide edit, for example, a nucleotide edit that corrects a c.2299delG mutation or a nucleotide edit that corrects a c.2276G->T mutation in the USH2A gene. In some embodiments, an effective amount can be an amount to induce, when administered to a population of cells, a certain percentage of the population of cells to have a correction of a mutation. For example, in some embodiments, an effective amount can be an amount to induce, when administered to or introduced to a population of cells, installation of an intended nucleotide edit, a nucleotide edit that corrects a c.2299delG mutation or a nucleotide edit that corrects a c.2276G->T mutation in the USH2A gene, in at least about 5%, about 10%, about 15%, about 20%, about 25%, about 30%, about 35%, about 40%, about 45%, about 50%, about 55%, about 60%, about 65%, about 70%, about 75%, about 80%, about 85%, about 90%, about 95%, or about 99% of the population of cells.

[0071] The terms “USH2A”, “Usherin”, “RP39”, “USH2”, “Usher Syndrome Type IIa Protein”, “DJ1111A8.1”, or “Usher Syndrome 2A” as used herein refers to the gene that encodes multiple isoforms of the polypeptide Usherin. The usherin isoforms include a short isoform a containing 21 exons leading to a 1546-aa secreted protein, and a very large isoform b with 51 additional exons that is predominant in the retina and the cochlear, giving rise to a 5202-aa matrix protein with a predicted total molecular weight of 570 kDa. The Usherin isoforms comprises an extracellular domain that is proposed to interact with basement membrane collagen IV and fibronectin via laminin domains (see, e.g., Maerker et al., 2008; Reiners et al., Hum Mol Genet. 2005 Dec. 15; 14(24): 3933-43). Usherin also interacts with other proteins of USH1 and USH2 complex to form Usher networks (Human Molecular Genetics, 26, 1157-1172). Mutations in USH2A are associated with Usher syndrome type II and non-syndromic retinitis pigmentosa (NSRP). The nucleotide and amino acid sequence of USH2A is known and may be found in, for example, GenBank Accession Nos. NM_206933, NM_007123, NM_021408, NP_009054, NP_996816, or NP_067383, the entire contents of each of which are incorporated herein by reference.

### Prime Editing

[0072] The term “prime editing” refers to programmable editing of a target DNA using a prime editor complexed with a PEgRNA to incorporate an intended nucleotide edit (also referred to herein as a nucleotide change) into the target DNA through target-primed DNA synthesis. A target gene of prime editing may comprise a double stranded DNA molecule having two complementary strands: a first strand that may be referred to as a “target strand” or a “non-edit strand”, and a second strand that may be referred to as a “non-target strand,” or an “edit strand.” In some embodiments, in a prime editing guide RNA (PEgRNA), a spacer sequence is complementary or substantially complementary to a specific sequence on the target strand, which may be referred to as a “search target sequence”. In some embodiments, the spacer sequence anneals with the target strand at the search target sequence. The target strand may also be referred to as the “non-Protospacer Adjacent Motif (non-PAM strand).” In some embodiments, the non-target strand may also be referred to as the “PAM strand”. In some embodiments, the PAM strand comprises a protospacer sequence and optionally a protospacer adjacent motif (PAM) sequence. In prime editing using a Cas-protein-based prime editor, a PAM sequence refers to a short DNA sequence immediately adjacent to the protospacer sequence on the PAM strand of the target gene. A PAM sequence may be specifically recognized by a programmable DNA binding protein, e.g., a Cas nickase or a Cas nuclease. In some embodiments, a specific PAM is characteristic of a specific programmable DNA binding protein, e.g., a Cas nickase or a Cas nuclease. A protospacer sequence refers to a specific sequence in the PAM strand of the target gene that is complementary to the search target sequence. In a PEgRNA, a spacer sequence may have a substantially identical sequence as the protospacer sequence on the edit strand of a target gene, except that the spacer sequence may comprise Uracil (U) and the protospacer sequence may comprise Thymine (T).

[0073] In some embodiments, the double stranded target DNA comprises a nick site on the PAM strand (or non-target strand). As used herein, a “nick site” refers to a specific position in between two nucleotides or two base pairs of the double stranded target DNA. In some embodiments, the position of a nick site is determined relative to the position of a specific PAM sequence. In some embodiments, the nick site is the particular position where a nick will occur when the double stranded target DNA is contacted with a nickase, for example, a Cas nickase, that recognizes a specific PAM sequence. In some embodiments, the nick site is upstream of a specific PAM sequence on the PAM strand of the double stranded target DNA. In some embodiments, the nick site is upstream of a PAM sequence recognized by a Cas9 nickase, wherein the Cas9 nickase comprises a nuclease active RuvC domain and a nuclease inactive HNH domain. In some embodiments, the nick site is downstream of a specific PAM sequence on the PAM strand of the double stranded target DNA. In some embodiments, the nick site is 3 nucleotides upstream of the PAM sequence, and the PAM sequence is recognized by a Streptococcus pyogenes Cas9 nickase, a P. lavamentivorans Cas9 nickase, a C. diphtheriae Cas9 nickase, a N. cinerea Cas9, a S. aureus Cas9, or a N. lari Cas9 nickase. In some embodiments, the nick site is 3 nucleotides upstream of the PAM sequence, and the PAM sequence is recognized by a Cas9 nickase, wherein the Cas9 nickase comprises a nuclease active RuvC domain and a nuclease inactive HNH domain. In some embodiments, the nick site is 2 nucleotides upstream of the PAM sequence, and the PAM sequence is recognized by a S. thermophilus Cas9 nickase that comprises a nuclease active RuvC domain and a nuclease inactive HNH domain.

[0074] A “primer binding site” (also referred to as PBS or primer binding site sequence) is a single-stranded portion of the PEgRNA that comprises a region of complementarity to the PAM strand (i.e., the non-target strand or the edit strand). The PBS is complementary or substantially complementary to a sequence on the PAM strand of the double stranded target DNA that is immediately upstream of the nick site. In some embodiments, in the process of prime editing, the PEgRNA complexes with and directs a prime editor to bind the search target sequence on the target strand of the double stranded target DNA, and generates a nick at the nick site on the non-target strand of the double stranded target DNA. In some embodiments, the PBS is complementary to or substantially complementary to, and can anneal to a free 3′ end on the non-target strand of the double stranded target DNA at the nick site. In some embodiments, the PBS annealed to the free 3′ end on the non-target strand can initiate target-primed DNA synthesis.

[0075] An “editing template” of a PEgRNA is a single-stranded portion of the PEgRNA that is 5′ of the PBS and which encodes a single strand of DNA. The editing template may comprise a region of complementarity to the PAM strand (i.e., the non-target strand or the edit strand), and comprises one or more intended nucleotide edits compared to the endogenous sequence of the double stranded target DNA. In some embodiments, the editing template and the PBS are immediately adjacent to each other. Accordingly, in some embodiments, a PEgRNA in prime editing comprises a single-stranded portion that comprises the PBS and the editing template immediately adjacent to each other. In some embodiments, the single stranded portion of the PEgRNA comprising both the PBS and the editing template is complementary or substantially complementary to an endogenous sequence on the PAM strand (i.e., the non-target strand or the edit strand) of the double stranded target DNA except for one or more non-complementary nucleotides at the intended nucleotide edit position(s). As used herein, regardless of relative 5′-3′ positioning in other context, the relative positions as between the PBS and the editing template, and the relative positions as among elements of a PEgRNA, are determined by the 5′ to 3′ order of the PEgRNA as a single molecule regardless of the position of sequences in the double stranded target DNA that may have complementarity or identity to elements of the PEgRNA. In some embodiments, the editing template is complementary or substantially complementary to a sequence on the PAM strand that is immediately downstream of the nick site, except for one or more non-complementary nucleotides at the intended nucleotide edit positions. The endogenous, e.g., genomic, sequence that is complementary or substantially complementary to the editing template, except for the one or more non-complementary nucleotides at the position corresponding to the intended nucleotide edit, may be referred to as an “editing target sequence”. In some embodiments, the editing template has identity or substantial identity to a sequence on the target strand that is complementary to, or having the same position in the genome as, the editing target sequence, except for one or more insertions, deletions, or substitutions at the intended nucleotide edit positions. In some embodiments, the editing template encodes a single stranded DNA, wherein the single stranded DNA has identity or substantial identity to the editing target sequence except for one or more insertions, deletions, or substitutions at the positions of the one or more intended nucleotide edits. In some embodiments, the editing template may encode the wild-type or non-disease associated gene sequence (or its complement if the edit strand is the antisense strand of a gene). In some embodiments, the editing template may encode the wild-type or non-disease associated protein, but contain one or more synonymous mutations relative to the wild-type or non-disease associated protein coding region. Such synonymous mutations may include, for example, mutations that decrease the ability of a PEgRNA to rebind to the same target sequence once the desired edit is installed in the genome (e.g., synonymous mutations that silence the endogenous PAM sequence or that edit the endogenous protospacer).

[0076] In some embodiments, a PEgRNA complexes with and directs a prime editor to bind to the search target sequence of the target gene. In some embodiments, the bound prime editor generates a nick on the edit strand (PAM strand) of the target gene at the nick site. In some embodiments, a primer binding site (PBS) of the PEgRNA anneals with a free 3′ end formed at the nick site, and the prime editor initiates DNA synthesis from the nick site, using the free 3′ end as a primer. Subsequently, a single-stranded DNA encoded by the editing template of the PEgRNA is synthesized. In some embodiments, the newly synthesized single-stranded DNA comprises one or more intended nucleotide edits compared to an endogenous target gene sequence. Accordingly, in some embodiments, the editing template of a PEgRNA is complementary to a sequence in the edit strand except for one or more mismatches at the intended nucleotide edit positions in the editing template. The endogenous, e.g., genomic, sequence that is partially complementary to the editing template may be referred to as an “editing target sequence”. Accordingly, in some embodiments, the newly synthesized single-stranded DNA has identity or substantial identity to a sequence in the editing target sequence, except for one or more insertions, deletions, or substitutions intended nucleotide edit positions. In some embodiments, the editing template comprises at least 4 contiguous nucleotides of complementarity with the edit strand wherein the at least 4 nucleotides contiguous are located upstream of the 5′ most edit in the editing template.

[0077] In some embodiments, the newly synthesized single-stranded DNA equilibrates with the editing target on the edit strand of the target gene for pairing with the target strand of the target gene. In some embodiments, the editing target sequence of the target gene is excised by a flap endonuclease (FEN), for example, FEN1. In some embodiments, the FEN is an endogenous FEN, for example, in a cell comprising the target gene. In some embodiments, the FEN is provided as part of the prime editor, either linked to other components of the prime editor or provided in trans. In some embodiments, the newly synthesized single stranded DNA, which comprises the intended nucleotide edit, replaces the endogenous single stranded editing target sequence on the edit strand of the target gene. In some embodiments, the newly synthesized single stranded DNA and the endogenous DNA on the target strand form a heteroduplex DNA structure at the region corresponding to the editing target sequence of the target gene. In some embodiments, the newly synthesized single-stranded DNA comprising the nucleotide edit is paired in the heteroduplex with the target strand of the target DNA that does not comprise the nucleotide edit, thereby creating a mismatch between the two otherwise complementary strands. In some embodiments, the mismatch is recognized by DNA repair machinery, e.g., an endogenous DNA repair machinery. In some embodiments, through DNA repair, the intended nucleotide edit is incorporated into the target gene.

### Prime Editor

[0078] The term “prime editor (PE)” refers to the polypeptide or polypeptide components involved in prime editing, or any polynucleotide(s) encoding the polypeptide or polypeptide components. In various embodiments, a prime editor includes a polypeptide domain having DNA binding activity and a polypeptide domain having DNA polymerase activity. In some embodiments, the prime editor further comprises a polypeptide domain having nuclease activity. In some embodiments, the polypeptide domain having DNA binding activity comprises a nuclease domain or nuclease activity. In some embodiments, the polypeptide domain having nuclease activity comprises a nickase, or a fully active nuclease. As used herein, the term “nickase” refers to a nuclease capable of cleaving only one strand of a double-stranded DNA target. In some embodiments, the prime editor comprises a polypeptide domain that is an inactive nuclease. In some embodiments, the polypeptide domain having programmable DNA binding activity comprises a nucleic acid guided DNA binding domain, for example, a CRISPR-Cas protein, for example, a Cas9 nickase, a Cpf1 nickase, or another CRISPR-Cas nuclease. In some embodiments, the polypeptide domain having DNA polymerase activity comprises a template-dependent DNA polymerase, for example, a DNA-dependent DNA polymerase or an RNA-dependent DNA polymerase. In some embodiments, the DNA polymerase is a reverse transcriptase. In some embodiments, the prime editor comprises additional polypeptides involved in prime editing, for example, a polypeptide domain having 5′ endonuclease activity, e.g., a 5′ endogenous DNA flap endonucleases (e.g., FEN1), for helping to drive the prime editing process towards the edited product formation. In some embodiments, the prime editor further comprises an RNA-protein recruitment polypeptide, for example, a MS2 coat protein.

[0079] A prime editor may be engineered. In some embodiments, the polypeptide components of a prime editor do not naturally occur in the same organism or cellular environment. In some embodiments, the polypeptide components of a prime editor may be of different origins or from different organisms. In some embodiments, a prime editor comprises a DNA binding domain and a DNA polymerase domain that are derived from different species. In some embodiments, a prime editor comprises a Cas polypeptide (DNA binding domain) and a reverse transcriptase polypeptide (DNA polymerase) that are derived from different species. For example, a prime editor may comprise a S. pyogenes Cas9 polypeptide and a Moloney murine leukemia virus (M-MLV) reverse transcriptase polypeptide.

[0080] In some embodiments, polypeptide domains of a prime editor may be fused or linked by a peptide linker to form a fusion protein. In other embodiments, a prime editor comprises one or more polypeptide domains provided in trans as separate proteins, which are capable of being associated to each other through non-peptide linkages or through aptamers or recruitment sequences. For example, a prime editor may comprise a DNA binding domain and a reverse transcriptase domain associated with each other by an RNA-protein recruitment aptamer, e.g., a MS2 aptamer, which may be linked to a PEgRNA. Prime editor polypeptide components may be encoded by one or more polynucleotides in whole or in part. In some embodiments, a single polynucleotide, construct, or vector encodes the prime editor fusion protein. In some embodiments, multiple polynucleotides, constructs, or vectors each encode a polypeptide domain or portion of a domain of a prime editor, or a portion of a prime editor fusion protein. For example, a prime editor fusion protein may comprise an N-terminal portion fused to an intein-N and a C-terminal portion fused to an intein-C, each of which is individually encoded by an AAV vector.

### Prime Editor Nucleotide Polymerase Domain

[0081] In some embodiments, a prime editor comprises a nucleotide polymerase domain, e.g., a DNA polymerase domain. The DNA polymerase domain may be a wild-type DNA polymerase domain, a full-length DNA polymerase protein domain, or may be a functional mutant, a functional variant, or a functional fragment thereof. In some embodiments, the polymerase domain is a template dependent polymerase domain. For example, the DNA polymerase may rely on a template polynucleotide strand, e.g., the editing template sequence, for new strand DNA synthesis. In some embodiments, the prime editor comprises a DNA-dependent DNA polymerase. For example, a prime editor having a DNA-dependent DNA polymerase can synthesize a new single stranded DNA using a PEgRNA editing template that comprises a DNA sequence as a template. In such cases, the PEgRNA is a chimeric or hybrid PEgRNA, and comprising an extension arm comprising a DNA strand. The chimeric or hybrid PEgRNA may comprise an RNA portion (including the spacer and the gRNA core) and a DNA portion (the extension arm comprising the editing template that includes a strand of DNA).

[0082] In some embodiments, the DNA polymerases can be wild type polymerases from eukaryotic, prokaryotic, archaeal, or viral organisms, and/or the polymerases may be modified by genetic engineering, mutagenesis, or directed evolution-based processes. The polymerases can be a T7 DNA polymerase, T5 DNA polymerase, T4 DNA polymerase, Klenow fragment DNA polymerase, DNA polymerase III and the like. The polymerases can be thermostable, and can include Taq, Tne, Tma, Pfu, Tfl, Tth, Stoffel fragment, VENT® and DEEPVENT® DNA polymerases, KOD, Tgo, JDF3, and mutants, variants and derivatives thereof.

[0083] In some embodiments, the DNA polymerase is a bacteriophage polymerase, for example, a T4, T7, or phi29 DNA polymerase. In some embodiments, the DNA polymerase is an archaeal polymerase, for example, pol I type archaeal polymerase or a pol II type archaeal polymerase. In some embodiments, the DNA polymerase comprises a thermostable archaeal DNA polymerase. In some embodiments, the DNA polymerase comprises a eubacterial DNA polymerase, for example, Pol I, Pol II, or Pol III polymerase. In some embodiments, the DNA polymerase is a Pol I family DNA polymerase. In some embodiments, the DNA polymerase is a E. coli Pol I DNA polymerase. In some embodiments, the DNA polymerase is a Pol II family DNA polymerase. In some embodiments, the DNA polymerase is a Pyrococcusfuriosus (Pfu) Pol II DNA polymerase. In some embodiments, the DNA Polymerase is a Pol IV family DNA polymerase. In some embodiments, the DNA polymerase is a E. coli Pol IV DNA polymerase.

[0084] In some embodiments, the DNA polymerase comprises a eukaryotic DNA polymerase. In some embodiments, the DNA polymerase is a Pol-beta DNA polymerase, a Pol-lambda DNA polymerase, a Pol-sigma DNA polymerase, or a Pol-mu DNA polymerase. In some embodiments, the DNA polymerase is a Pol-alpha DNA polymerase. In some embodiments, the DNA polymerase is a POLA1 DNA polymerase. In some embodiments, the DNA polymerase is a POLA2 DNA polymerase. In some embodiments, the DNA polymerase is a Pol-delta DNA polymerase. In some embodiments, the DNA polymerase is a POLD1 DNA polymerase. In some embodiments, the DNA polymerase is a POLD2 DNA polymerase. In some embodiments, the DNA polymerase is a human POLDI DNA polymerase. In some embodiments, the DNA polymerase is a human POLD2 DNA polymerase. In some embodiments, the DNA polymerase is a POLD3 DNA polymerase. In some embodiments, the DNA polymerase is a POLD4 DNA polymerase. In some embodiments, the DNA polymerase is a Pol-epsilon DNA polymerase. In some embodiments, the DNA polymerase is a POLE1 DNA polymerase. In some embodiments, the DNA polymerase is a POLE2 DNA polymerase. In some embodiments, the DNA polymerase is a POLE3 DNA polymerase. In some embodiments, the DNA polymerase is a Pol-eta (POLH) DNA polymerase. In some embodiments, the DNA polymerase is a Pol-iota (POLI) DNA polymerase. In some embodiments, the DNA polymerase is a Pol-kappa (POLK) DNA polymerase. In some embodiments, the DNA polymerase is a RevI DNA polymerase. In some embodiments, the DNA polymerase is a human Rev1 DNA polymerase. In some embodiments, the DNA polymerase is a viral DNA-dependent DNA polymerase. In some embodiments, the DNA polymerase is a B family DNA polymerases. In some embodiments, the DNA polymerase is a herpes simplex virus (HSV) UL30 DNA polymerase. In some embodiments, the DNA polymerase is a cytomegalovirus (CMV) UL54 DNA polymerase.

[0085] In some embodiments, the DNA polymerase is an archaeal polymerase. In some embodiments, the DNA polymerase is a Family B/pol I type DNA polymerase. For example, in some embodiments, the DNA polymerase is a homolog of Pfu from Pyrococcusfuriosus. In some embodiments, the DNA polymerase is a pol II type DNA polymerase. For example, in some embodiments, the DNA polymerase is a homolog of P.furiosus DP1/DP2 2-subunit polymerase. In some embodiments, the DNA polymerase lacks 5′ to 3′ nuclease activity. Suitable DNA polymerases (pol I or pol II) can be derived from archaea with optimal growth temperatures that are similar to the desired assay temperatures.

[0086] In some embodiments, the DNA polymerase comprises a thermostable archaeal DNA polymerase. In some embodiments, the thermostable DNA polymerase is isolated or derived from Pyrococcus species (furiosus, species GB-D, woesii, abysii, horikoshii), Thermococcus species (kodakaraensis KODI, litoralis, species 9 degrees North-7, species JDF-3, gorgonarius), Pyrodictium occultum, and Archaeoglobus fulgidus.

[0087] Polymerases may also be from eubacterial species. In some embodiments, the DNA polymerase is a Pol I family DNA polymerase. In some embodiments, the DNA polymerase is an E. coli Pol I DNA polymerase. In some embodiments, the DNA polymerase is a Pol II family DNA polymerase. In some embodiments, the DNA polymerase is a Pyrococcusfuriosus (Pfu) Pol II DNA polymerase. In some embodiments, the DNA Polymerase is a Pol III family DNA polymerase. In some embodiments, the DNA Polymerase is a Pol IV family DNA polymerase. In some embodiments, the DNA polymerase is an E. coli Pol IV DNA polymerase. In some embodiments, the Pol I DNA polymerase is a DNA polymerase functional variant that lacks or has reduced 5′ to 3′ exonuclease activity.

[0088] Suitable thermostable pol I DNA polymerases can be isolated from a variety of thermophilic eubacteria, including Thermus species and Thermotoga maritima such as Thermus aquaticus (Taq), Thermus thermophilus (Tth) and Thermotoga maritima (Tma UlTma).

[0089] In some embodiments, a prime editor comprises an RNA-dependent DNA polymerase domain, for example, a reverse transcriptase (RT). A RT or an RT domain may be a wild type RT domain, a full-length RT domain, or may be a functional mutant, a functional variant, or a functional fragment thereof. An RT or an RT domain of a prime editor may comprise a wild-type RT, or may be engineered or evolved to contain specific amino acid substitutions, truncations, or variants. An engineered RT may comprise sequences or amino acid changes different from a naturally occurring RT. In some embodiments, the engineered RT may have improved reverse transcription activity over a naturally occurring RT or RT domain. In some embodiments, the engineered RT may have improved features over a naturally occurring RT, for example, improved thermostability, reverse transcription efficiency, or target fidelity. In some embodiments, a prime editor comprising the engineered RT has improved prime editing efficiency over a prime editor having a reference naturally occurring RT.

[0090] In some embodiments, a prime editor comprises a virus RT, for example, a retrovirus RT. Non-limiting examples of virus RT include Moloney murine leukemia virus (M-MLV or MMLV) RT; human T-cell leukemia virus type 1 (HTLV-1) RT; bovine leukemia virus (BLV) RT; Rous Sarcoma Virus (RSV) RT; human immunodeficiency virus (HIV) RT, M-MFV RT, Avian Sarcoma-Leukosis Virus (ASLV) RT, Rous Sarcoma Virus (RSV) RT, Avian Myeloblastosis Virus (AMV) RT, Avian Erythroblastosis Virus (AEV) Helper Virus MCAV RT, Avian Myelocytomatosis Virus MC29 Helper Virus MCAV RT, Avian Reticuloendotheliosis Virus (REV-T) Helper Virus REV-A RT, Avian Sarcoma Virus UR2 Helper Virus (UR2AV) RT, Avian Sarcoma Virus Y73 Helper Virus YAV RT, Rous Associated Virus (RAV) RT, and Myeloblastosis Associated Virus (MAV) RT, all of which may be suitably used in the methods and composition described herein.

[0091] In some embodiments, the prime editor comprises a wild type M-MLV RT, a functional mutant, a functional variant, or a functional fragment thereof. An exemplary sequence of a reference M-MLV RT is provided in SEQ ID NO: 7597.

[0092] In some embodiments, the prime editor comprises a reference M-MLV RT, a functional mutant, a functional variant, or a functional fragment thereof. In some embodiments, the RT domain or a RT is a M-MLV RT (e.g., wild-type M-MLV RT, a functional mutant, a functional variant, or a functional fragment thereof). In some embodiments, the RT domain or a RT is a M-MLV RT (e.g., a reference M-MLV RT, a functional mutant, a functional variant, or a functional fragment thereof). In some embodiments, a M-MLV RT, e.g., reference M-MLV RT, comprises an amino acid sequence as set forth in SEQ ID NO: 7597.

[0093] In some embodiments, a reference M-MLV RT is a wild-type M-MLV RT. An exemplary amino acid sequence of a reference M-MLV RT is provided in SEQ ID NO: 7599.

[0094] In some embodiments, the prime editor comprises a wild type M-MLV RT. An exemplary amino acid sequence of a wild type M-MLV RT is provided in SEQ ID NO: 7599.

(SEQ ID NO: 7599)
TLNIEDEHRLHETSKEPDVSLGSTWLSDFPQAWAETGGMGLAVRQAPLIIPLKATSTPVSI
KQYPMSQEARLGIKPHIQRLLDQGILVPCQSPWNTPLLPVKKPGTNDYRPVQDLREVNKRVEDI
HPTVPNPYNLLSGLPPSHQWYTVLDLKDAFFCLRLHPTSQPLFAFEWRDPEMGISGQLTWTRLP
QGFKNSPTLFDEALHRDLADFRIQHPDLILLQYVDDLLLAATSELDCQQGTRALLQTLGNLGYR
ASAKKAQICQKQVKYLGYLLKEGQRWLTEARKETVMGQPTPKTPRQLREFLGTAGFCRLWIPG
FAEMAAPLYPLTKTGTLFNWGPDQQKAYQEIKQALLTAPALGLPDLTKPFELFVDEKQGYAKG
VLTQKLGPWRRPVAYLSKKLDPVAAGWPPCLRMVAAIAVLTKDAGKLTMGQPLVILAPHAVE
ALVKQPPDRWLSNARMTHYQALLLDTDRVQFGPVVALNPATLLPLPEEGLQHNCLDILAEAHG
TRPDLTDQPLPDADHTWYTDGSSLLQEGQRKAGAAVTTETEVIWAKALPAGTSAQRAELIALTQ
ALKMAEGKKLNVYTDSRYAFATAHIHGEIYRRRGLLTSEGKEIKNKDEILALLKALFLPKRLSIIH
CPGHQKGHSAEARGNRMADQAARKAAITETPDTSTLLIENSSP

[0095] In some embodiments, the prime editor comprises a reference M-MLV RT. An exemplary amino acid sequence of a reference M-MLV RT is provided in SEQ ID NO: 7597.

(SEQ ID NO: 7597)
TLNIEDEYRLHETSKEPDVSLGSTWLSDFPQAWAETGGMGLAVRQAPLIIPLKATSTPVSI
KQYPMSQEARLGIKPHIQRLLDQGILVPCQSPWNTPLLPVKKPGTNDYRPVQDLREVNKRVEDI
HPTVPNPYNLLSGLPPSHQWYTVLDLKDAFFCLRLHPTSQPLFAFEWRDPEMGISGQLTWTRLP
QGFKNSPTLFDEALHRDLADFRIQHPDLILLQYVDDLLLAATSELDCQQGTRALLQTLGNLGYR
ASAKKAQICQKQVKYLGYLLKEGQRWLTEARKETVMGQPTPKTPRQLREFLGTAGFCRLWIPG
FAEMAAPLYPLTKTGTLFNWGPDQQKAYQEIKQALLTAPALGLPDLTKPFELFVDEKQGYAKG
VLTQKLGPWRRPVAYLSKKLDPVAAGWPPCLRMVAAIAVLTKDAGKLTMGQPLVILAPHAVE
ALVKQPPDRWLSNARMTHYQALLLDTDRVQFGPVVALNPATLLPLPEEGLQHNCLDILAEAHG
TRPDLTDQPLPDADHTWYTDGSSLLQEGQRKAGAAVTTETEVIWAKALPAGTSAQRAELIALTQ
ALKMAEGKKLNVYTDSRYAFATAHIHGEIYRRRGLLTSEGKEIKNKDEILALLKALFLPKRLSIIH
CPGHQKGHSAEARGNRMADQAARKAAITETPDTSTLLIENSSP

[0096] In some embodiments, the prime editor comprises a M-MMLV RT comprising one or more of amino acid substitutions P51X, S67X, E69X, L139X, T197X, D200X, H204X, F209X, E302X, T306X, F309X, W313X, T330X, L345X, L435X, N454X, D524X, E562X, D583X, H594X, L603X, E607X, or D653X as compared to the reference M-MLV RT as set forth in SEQ ID NO: 7597, where X is any amino acid other than the wild type amino acid. In some embodiments, the prime editor comprises a M-MLV RT comprising one or more of amino acid substitutions P5IL, S67K, E69K, L139P, T197A, D200N, H204R, F209N, E302K, E302R, T306K, F309N, W313F, T330P, L345G, L435G, N454K, D524G, E562Q, D583N, H594Q, L603W, E607K, and D653N as compared to the reference M-MLV RT as set forth in SEQ ID NO: 7597. In some embodiments, the prime editor comprises a M-MLV RT comprising one or more amino acid substitutions D200N, T330P, L603W, T306K, and W313F as compared to the reference M-MLV RT as set forth in SEQ ID NO: 7597. In some embodiments, the prime editor comprises a M-MLV RT comprising amino acid substitutions D200N, T330P, L603W, T306K, and W313F as compared to the reference M-MLV RT as set forth in SEQ ID NO: 7597.

[0097] In some embodiments, the prime editor comprises a M-MLV RT comprising one or more of amino acid substitutions D200N, T330P, L603W, T306K, and W313F as compared to a wild type M-MMLV RT as set forth in SEQ ID NO: 7599. In some embodiments, the prime editor comprises a M-MLV RT that comprises an amino acid sequence that is at least 70%, at least 75%, at least 80%, at least 85%, at least 90%, at least 95%, at least 96%, at least 97%, at least 98%, at least 99%, at least 99.5%, or at least 99.9% identical to an amino acid sequence set forth in any one of SEQ ID NOs: 7597, 7599, or 7564. In some embodiments, the prime editor comprises a M-MLV RT that comprises an amino acid sequence that is selected from the group consisting of SEQ ID NOs: 7597, 7599, or 7564 or a variant or fragment thereof. In some embodiments, the prime editor comprises a M-MLV RT that comprises an amino acid sequence set forth in SEQ ID NO: 7564

(SEQ ID NO: 7564)
TLNIEDEYRLHETSKEPDVSLGSTWLSDFPQAWAETGGMGLAVRQAPLIIPLKATSTPVSI
KQYPMSQEARLGIKPHIQRLLDQGILVPCQSPWNTPLLPVKKPGTNDYRPVQDLREVNKRVEDI
HPTVPNPYNLLSGLPPSHQWYTVLDLKDAFFCLRLHPTSQPLFAFEWRDPEMGISGQLTWTRLP
QGFKNSPTLFNEALHRDLADFRIQHPDLILLQYVDDLLLAATSELDCQQGTRALLQTLGNLGYR
ASAKKAQICQKQVKYLGYLLKEGQRWLTEARKETVMGQPTPKTPRQLREFLGKAGFCRLFIPGF
AEMAAPLYPLTKPGTLFNWGPDQQKAYQEIKQALLTAPALGLPDLTKPFELFVDEKQGYAKGV
LTQKLGPWRRPVAYLSKKLDPVAAGWPPCLRMVAAIAVLTKDAGKLTMGQPLVILAPHAVEA
LVKQPPDRWLSNARMTHYQALLLDTDRVQFGPVVALNPATLLPLPEEGLQHNCLDILAEAHGT
RPDLTDQPLPDADHTWYTDGSSLLQEGQRKAGAAVTTETEVIWAKALPAGTSAQRAELIALTQ
ALKMAEGKKLNVYTDSRYAFATAHIHGEIYRRRGWLTSEGKEIKNKDEILALLKALFLPKRLSII
HCPGHQKGHSAEARGNRMADQAARKAAITETPDTSTLLIENSSP

[0098] In some embodiments, an RT variant may be a functional fragment of a reference RT that has 1, 2, 3, 4, 5, 6, 7, 8, 9, 10, 11, 12, 13, 14, 15, 16, 17, 18, 19, 20, 21, 22, 21, 24, 25, 26, 27, 28, 29, 30, 31, 32, 33, 34, 35, 36, 37, 38, 39, 40, 41, 42, 43, 44, 45, 46, 47, 48, 49, 50, or up to 100, or up to 200, or up to 300, or up to 400, or up to 500 or more amino acid changes compared to a wild type RT (e.g., SEQ ID NO: 7599). In some embodiments, the RT variant comprises a fragment of a wild type RT (e.g., SEQ ID NO: 7599), such that the fragment is about 70% identical, about 80% identical, about 90% identical, about 95% identical, about 96% identical, about 97% identical, about 98% identical, about 99% identical, about 99.5% identical, or about 99.9% identical to the corresponding fragment of the wild type RT (e.g., SEQ ID NO: 7599). In some embodiments, the fragment is 30%, 35%, 40%, 45%, 50%, 55%, 60%, 65%, 70%, 75%, 80%, 85%, 90%, 95% identical, 96%, 97%, 98%, 99%, or 99.5% of the amino acid length of a corresponding wild type RT (M-MLV reverse transcriptase) (e.g., SEQ ID NO: 7599).

[0099] In some embodiments, an RT variant may be a functional fragment of a reference RT that have 1, 2, 3, 4, 5, 6, 7, 8, 9, 10, 11, 12, 13, 14, 15, 16, 17, 18, 19, 20, 21, 22, 21, 24, 25, 26, 27, 28, 29, 30, 31, 32, 33, 34, 35, 36, 37, 38, 39, 40, 41, 42, 43, 44, 45, 46, 47, 48, 49, 50, or up to 100, or up to 200, or up to 300, or up to 400, or up to 500 or more amino acid changes compared to a reference RT, e.g., SEQ ID NO: 7597. In some embodiments, the RT variant comprises a fragment of a reference RT, such that the fragment is about 70% identical, about 80% identical, about 90% identical, about 95% identical, about 96% identical, about 97% identical, about 98% identical, about 99% identical, about 99.5% identical, or about 99.9% identical to the corresponding fragment of a reference RT (e.g., SEQ ID NO: 7597). In some embodiments, the fragment is 30%, 35%, 40%, 45%, 50%, 55%, 60%, 65%, 70%, 75%, 80%, 85%, 90%, 95% identical, 96%, 97%, 98%, 99%, or 99.5% of the amino acid length of a reference RT (e.g., M-MLV RT) (e.g., SEQ ID NO: 7597).

[0100] In some embodiments, the RT functional fragment is at least 100 amino acids in length. In some embodiments, the fragment is at least 100, 150, 200, 250, 300, 350, 400, 450, 500, 550, or up to 600 or more amino acids in length.

[0101] In still other embodiments, the functional RT variant is truncated at the N-terminus or the C-terminus, or both, by a certain number of amino acids which results in a truncated variant which still retains sufficient DNA polymerase function. In some embodiments, the functional RT variant, e.g., a functional MMLV RT variant, is truncated at the C-terminus to abolish or reduce RNAaseH activity and still retain DNA polymerase activity.

[0102] In some embodiments, a prime editing composition or a prime editing system disclosed herein comprises a polynucleotide (e.g., a DNA, a RNA, e.g., a mRNA) that encodes a M-MLV RT. In some embodiments, the polynucleotide encodes a M-MLV RT that comprises an amino acid sequence that is at least 70%, at least 75%, at least 80%, at least 85%, at least 90%, at least 95%, at least 96%, at least 97%, at least 98%, at least 99%, at least 99.5%, or at least 99.9% identical to an amino acid sequence set forth in any one of SEQ ID NOs: 7597, 7599, or 7564. In some embodiments, the polynucleotide encodes a M-MLV RT that comprises an amino acid sequence that is selected from the group consisting of SEQ ID NOs: 7597, 7599, or 7564. In some embodiments, the polynucleotide encodes a M-MLV RT that comprises an amino acid sequence that is set forth in SEQ ID NO: 7564.

[0103] In some embodiments, a prime editor comprises a eukaryotic RT, for example, a yeast, drosophila, rodent, or primate RT. In some embodiments, the prime editor comprises a Group II intron RT, for example, a. Geobacillus stearothermophilus Group II Intron (GsI-IIC) RT or a Eubacterium rectale group II intron (Eu.re.I2) RT. In some embodiments, the prime editor comprises a retron RT. In some embodiments, a prime editor comprises a eukaryotic RT, for example, a yeast, drosophila, rodent, or primate RT. In some embodiments, the prime editor comprises a Group II intron RT, for example, a. Geobacillus stearothermophilus Group II Intron (GsI-IIC) RT or a Eubacterium rectale group II intron (Eu.re.I2) RT. In some embodiments, the prime editor comprises a retron RT.

### Programmable DNA Binding Domain

[0104] In some embodiments, the DNA-binding domain of a prime editor is a programmable DNA binding domain. In some embodiments, a prime editor comprises a DNA binding domain that comprises an amino acid sequence that is at least 50%, at least 60%, at least 70%, at least 75%, at least 80%, 85%, at least 86%, at least 87%, at least 88%, at least 89%, at least 90%, at least 91%, at least 92%, at least 93%, at least 94%, at least 95%, at least 96%, at least 97%, at least 98%, at least 99%, or 100% identical to any one of the sequences set forth in SEQ ID NOs: 7593, 7567, 7562, 7568, 7569, 7570, 7571-7592 [0107]. In some embodiments, the DNA binding domain comprises an amino acid sequence that has no more than 1, 2, 3, 4, 5, 6, 7, 8, 9, 10, 11, 12, 13, 14, 15, 16, 17, 18, 19, or 20 differences e.g., mutations e.g., deletions, substitutions and/or insertions compared to any one of the amino acid sequences set forth in SEQ ID NOs: 7593, 7567, 7562, 7568, 7569, 7570, 7571-7592.

[0105] In some embodiments, the DNA-binding domain of a prime editor is a programmable DNA binding domain. A programmable DNA binding domain refers to a protein domain that is designed to bind a specific nucleic acid sequence, e.g., a target DNA or a target RNA. In some embodiments, the DNA-binding domain is a polynucleotide programmable DNA-binding domain that can associate with a guide polynucleotide (e.g., a PEgRNA) that guides the DNA-binding domain to a specific DNA sequence, e.g., a search target sequence in a target gene. In some embodiments, the DNA-binding domain comprises a Clustered Regularly Interspaced Short Palindromic Repeats (CRISPR) Associated (Cas) protein. A Cas protein may comprise any Cas protein described herein or a functional fragment or functional variant thereof. In some embodiments, a DNA-binding domain may also comprise a zinc-finger protein domain. In other cases, a DNA-binding domain comprises a transcription activator-like effector domain (TALE). In some embodiments, the DNA-binding domain comprises a DNA nuclease. For example, the DNA-binding domain of a prime editor may comprise an RNA-guided DNA endonuclease, e.g., a Cas protein. In some embodiments, the DNA-binding domain comprises a zinc finger nuclease (ZFN) or a transcription activator like effector domain nuclease (TALEN), where one or more zinc finger motifs or TALE motifs are associated with one or more nucleases, e.g., a Fok I nuclease domain.

[0106] In some embodiments, the DNA-binding domain comprises a nuclease activity. In some embodiments, the DNA-binding domain of a prime editor comprises an endonuclease domain having single strand DNA cleavage activity. For example, the endonuclease domain may comprise a FokI nuclease domain. In some embodiments, the DNA-binding domain of a prime editor comprises a nuclease having full nuclease activity. In some embodiments, the DNA-binding domain of a prime editor comprises a nuclease having modified or reduced nuclease activity as compared to a wild type endonuclease domain. For example, the endonuclease domain may comprise one or more amino acid substitutions as compared to a wild type endonuclease domain. In some embodiments, the DNA-binding domain of a prime editor has nickase activity. In some embodiments, the DNA-binding domain of a prime editor comprises a Cas protein domain that is a nickase. In some embodiments, compared to a wild type Cas protein, the Cas nickase comprises one or more amino acid substitutions in a nuclease domain that reduces or abolishes its double strand nuclease activity but retains DNA binding activity. In some embodiments, the Cas nickase comprises an amino acid substitution in a HNH domain. In some embodiments, the Cas nickase comprises an amino acid substitution in a RuvC domain.

[0107] In some embodiments, the DNA-binding domain comprises a CRISPR associated protein (Cas protein) domain. A Cas protein may be a Class 1 or a Class 2 Cas protein. A Cas protein can be a type I, type II, type III, type IV, type V Cas protein, or a type VI Cas protein. Non-limiting examples of Cas proteins include Cas1, Cas1B, Cas2, Cas3, Cas4, Cas5, Cas5d, Cas5t, Cas5h, Cas5a, Cas6, Cas7, Cas8, Cas8a, Cas8b, Cas8c, Cas9 (e.g., Csn1 or Csx12), Cas10, Cas10d, Cas12a/Cpf1, Cas12b/C2c1, Cas12c/C2c3, Cas12d/CasY, Cas12e/CasX, Cas12g, Cas12h, Cas12i, Csy1, Csy2, Csy3, Csy4, Cse1, Cse2, Cse3, Cse4, Cse5e, Csc1, Csc2, Csa5, Csn1, Csn2, Csm1, Csm2, Csm3, Csm4, Csm5, Csm6, Cmr1, Cmr3, Cmr4, Cmr5, Cmr6, Csb1, Csb2, Csb3, Csx17, Csx14, Csx1O, Csx16, CsaX, Csx3, Csx1, Csx1S, Csx11, Csf1, Csf2, CsO, Csf4, Csd1, Csd2, Cst1, Cst2, Csh1, Csh2, Csa1, Csa2, Csa3, Csa4, Csa5, Type II Cas effector proteins, Type V Cas effector proteins, Type VI Cas effector proteins, CARF, DinG, Cpf1, Cas12b/C2c1, Cas12c/C2c3, Cas12b/C2c1, Cas12c/C2c3, SpCas9(K855A), eSpCas9(1.1), SpCas9-HF1, hyper accurate Cas9 variant (HypaCas9), Cas 4D, and homologues, modified or engineered variants, mutants, and/or functional fragments thereof. A Cas protein can be a chimeric Cas protein that is fused to other proteins or polypeptides. A Cas protein can be a chimera of various Cas proteins, for example, comprising domains of Cas proteins from different organisms.

[0108] A Cas protein, e.g., Cas9, can be from any suitable organism. In some aspects, the organism is Streptococcus pyogenes (S. pyogenes). In some aspects, the organism is Staphylococcus aureus (S. aureus). In some aspects, the organism is Streptococcus thermophilus (S. thermophilus). In some embodiments, the organism is Staphylococcus lugdunensis. Non-limiting examples of suitable organism include Streptococcus pyogenes, Streptococcus thermophilus, Streptococcus sp., Staphylococcus aureus, Nocardiopsis dassonvillei, Streptomyces pristinae spiralis, Streptomyces viridochromo genes, Streptomyces viridochromogenes, Streptosporangium roseum, Streptosporangium roseum, AlicyclobacHlus acidocaldarius, Bacillus pseudomycoides, Bacillus selenitireducens, Exiguobacterium sibiricum, Lactobacillus delbrueckii, Lactobacillus salivarius, Microscilla marina, Burkholderiales bacterium, Polaromonas naphthalenivorans, Polaromonas sp., Crocosphaera watsonii, Cyanothece sp., Microcystis aeruginosa, Pseudomonas aeruginosa, Synechococcus sp., Acetohalobium arabaticum, Ammonifex degensii, Caldicelulosiruptor becscii, Candidatus Desulforudis, Clostridium botulinum, Clostridium difficile, Finegoldia magna, Natranaerobius thermophilus, Pelotomaculum thermopropionicum, Acidithiobacillus caldus, Acidithiobacillus ferrooxidans, Allochromatium vinosum, Marinobacter sp., Nitrosococcus halophilus, Nitrosococcus watsoni, Pseudoalteromonas haloplanktis, Ktedonobacter racemifer, Methanohalobium evestigatum, Anabaena variabilis, Nodularia spumigena, Nostoc sp., Arthrospira maxima, Arthrospira platensis, Arthrospira sp., Lyngbya sp., Microcoleus chthonoplastes, Oscillatoria sp., Petrotoga mobilis, Thermosipho africanus, Acaryochloris marina, Leptotrichia shahii, and Francisella novicida. In some embodiments, the organism is Streptococcus pyogenes (S. pyogenes). In some embodiments, the organism is Staphylococcus aureus (S. aureus). In some embodiments, the organism is Streptococcus thermophilus (S. thermophilus). In some embodiments, the organism is Staphylococcus lugdunensis (S. lugdunensis).

[0109] In some embodiments, a Cas protein can be derived from a variety of bacterial species including, but not limited to, Veillonella atypical, Fusobacterium nucleatum, Filifactor alocis, Solobacterium moorei, Coprococcus catus, Treponema denticola, Peptoniphilus duerdenii, Catenibacterium mitsuokai, Streptococcus mutans, Listeria innocua, Staphylococcus pseudintermedius, Acidaminococcus intestine, Olsenella uli, Oenococcus kitaharae, Bifidobacterium bifidum, Lactobacillus rhamnosus, Lactobacillus gasseri, Finegoldia magna, Mycoplasma mobile, Mycoplasma gallisepticum, Mycoplasma ovipneumoniae, Mycoplasma canis, Mycoplasma synoviae, Eubacterium rectale, Streptococcus thermophilus, Eubacterium dolichum, Lactobacillus coryniformis subsp. Torquens, Ilyobacter polytropus, Ruminococcus albus, Akkermansia muciniphila, Acidothermus cellulolyticus, Bifidobacterium longum, Bifidobacterium dentium, Corynebacterium diphtheria, Elusimicrobium minutum, Nitratifractor salsuginis, Sphaerochaeta globus, Fibrobacter succinogenes subsp. Succinogenes, Bacteroides fragilis, Capnocytophaga ochracea, Rhodopseudomonas palustris, Prevotella micans, Prevotella ruminicola, Flavobacterium columnare, Aminomonas paucivorans, Rhodospirillum rubrum, Candidatus Puniceispirillum marinum, Verminephrobacter eiseniae, Ralstonia syzygii, Dinoroseobacter shibae, Azospirillum, Nitrobacter hamburgensis, Bradyrhizobium, Wolinella succinogenes, Campylobacter jejuni subsp. Jejuni, Helicobacter mustelae, Bacillus cereus, Acidovorax ebreus, Clostridium perfringens, Parvibaculum lavamentivorans, Roseburia intestinalis, Neisseria meningitidis, Pasteurella multocida subsp. Multocida, Sutterella wadsworthensis, proteobacterium, Legionella pneumophila, Parasutterella excrementihominis, Wolinella succinogenes, and Francisella novicida.

[0110] In some embodiments, a Cas protein, e.g., Cas9, can be a wild type or a modified form of a Cas protein. In some embodiments, a Cas protein, e.g., Cas9, can be a nuclease active variant, nuclease inactive variant, a nickase, or a functional variant or functional fragment of a wild type Cas protein. In some embodiments, a Cas protein, e.g., Cas9, can be a wild type or a modified form of a Cas protein. A Cas protein, e.g., Cas9, can be a nuclease active variant, nuclease inactive variant, a nickase, or a functional variant or functional fragment of a wild type Cas protein. In some embodiments, a Cas protein, e.g., Cas9, can comprise an amino acid change such as a deletion, insertion, substitution, fusion, chimera, or any combination thereof relative to a corresponding wild-type version of the Cas protein. In some embodiments, a Cas protein can be a polypeptide with at least about 50%, 60%, 70%, 80%, 90%, 91%, 92%, 93%, 94%, 95%, 96%, 97%, 98%, 99%, or 100% sequence identity or sequence similarity to a wild type exemplary Cas protein.

[0111] A Cas protein, e.g., Cas9, may comprise one or more domains. Non-limiting examples of Cas domains include, guide nucleic acid recognition and/or binding domain, nuclease domains (e.g., DNase or RNase domains, RuvC, HNH), DNA binding domain, RNA binding domain, helicase domains, protein-protein interaction domains, and dimerization domains. In various embodiments, a Cas protein comprises a guide nucleic acid recognition and/or binding domain can interact with a guide nucleic acid, and one or more nuclease domains that comprise catalytic activity for nucleic acid cleavage.

[0112] In some embodiments, a Cas protein, e.g., Cas9, comprises one or more nuclease domains. A Cas protein can comprise an amino acid sequence having at least about 50%, 60%, 70%, 80%, 90%, 91%, 92%, 93%, 94%, 95%, 96%, 97%, 98%, 99%, or 100% sequence identity to a nuclease domain (e.g., RuvC domain, HNH domain) of a wild-type Cas protein. In some embodiments, a Cas protein comprises a single nuclease domain. For example, a Cpf1 may comprise a RuvC domain but lacks HNH domain. In some embodiments, a Cas protein comprises two nuclease domains, e.g., a Cas9 protein can comprise an HNH nuclease domain and a RuvC nuclease domain.

[0113] In some embodiments, a prime editor comprises a Cas protein, e.g., Cas9, wherein all nuclease domains of the Cas protein are active. In some embodiments, a prime editor comprises a Cas protein having one or more inactive nuclease domains. One or a plurality of the nuclease domains (e.g., RuvC, HNH) of a Cas protein can be deleted or mutated so that they are no longer functional or comprise reduced nuclease activity. In some embodiments, a Cas protein, e.g., Cas9, comprising mutations in a nuclease domain has reduced (e.g., nickase) or abolished nuclease activity while maintaining its ability to target a nucleic acid locus at a search target sequence when complexed with a guide nucleic acid, e.g., a PEgRNA.

[0114] In some embodiments, a prime editor comprises a Cas nickase that can bind to the target gene in a sequence-specific manner and generate a single-strand break at a protospacer within double-stranded DNA in the target gene, but not a double-strand break. For example, the Cas nickase can cleave the edit strand or the non-edit strand of the target gene, but may not cleave both. In some embodiments, a prime editor comprises a Cas nickase comprising two nuclease domains (e.g., Cas9), with one of the two nuclease domains modified to lack catalytic activity or deleted. In some embodiments, the Cas nickase of a prime editor comprises a nuclease inactive RuvC domain and a nuclease active HNH domain. In some embodiments, the Cas nickase of a prime editor comprises a nuclease inactive HNH domain and a nuclease active RuvC domain. In some embodiments, a prime editor comprises a Cas9 nickase having an amino acid substitution in the RuvC domain e.g., an amino acid substitution that reduces or abolishes nuclease activity of the RuvC domain. In some embodiments, the Cas9 nickase comprises a D1OX amino acid substitution compared to a wild type S. pyogenes Cas9, wherein X is any amino acid other than D. In some embodiments, a prime editor comprises a Cas9 nickase having an amino acid substitution in the HNH domain e.g., an amino acid substitution that reduces or abolishes nuclease activity of the HNH domain. In some embodiments, the Cas9 nickase comprises a H840X amino acid substitution compared to a wild type S. pyogenes Cas9, wherein X is any amino acid other than H.

[0115] In some embodiments, a prime editor comprises a Cas protein that can bind to the target gene in a sequence-specific manner but lacks or has abolished nuclease activity and may not cleave either strand of a double stranded DNA in a target gene. Abolished activity or lacking activity can refer to an enzymatic activity less than 1%, less than 2%, less than 3%, less than 4%, less than 5%, less than 6%, less than 7%, less than 8%, less than 9%, or less than 10% activity compared to a wild-type exemplary activity (e.g., wild-type Cas9 nuclease activity). In some embodiments, a Cas protein of a prime editor completely lacks nuclease activity. A nuclease, e.g., Cas9, that lacks nuclease activity may be referred to as nuclease inactive or “nuclease dead” (abbreviated by “d”). A nuclease dead Cas protein (e.g., dCas, dCas9) can bind to a target polynucleotide but may not cleave the target polynucleotide. In some embodiments, a dead Cas protein is a dead Cas9 protein. In some embodiments, a prime editor comprises a nuclease dead Cas protein wherein all of the nuclease domains (e.g., both RuvC and HNH nuclease domains in a Cas9 protein; RuvC nuclease domain in a Cpf1 protein) are mutated to lack catalytic activity, or are deleted.

[0116] A Cas protein can be modified. A Cas protein, e.g., Cas9, can be modified to increase or decrease nucleic acid binding affinity, nucleic acid binding specificity, and/or enzymatic activity. Cas proteins can also be modified to change any other activity or property of the protein, such as stability. For example, one or more nuclease domains of the Cas protein can be modified, deleted, or inactivated, or a Cas protein can be truncated to remove domains that are not essential for the function of the protein or to optimize (e.g., enhance or reduce) the activity of the Cas protein.

[0117] A Cas protein can be a fusion protein. For example, a Cas protein can be fused to a cleavage domain, an epigenetic modification domain, a transcriptional regulation domain, or a polymerase domain. A Cas protein can also be fused to a heterologous polypeptide providing increased or decreased stability. The fused domain or heterologous polypeptide can be located at the N-terminus, the C-terminus, or internally within the Cas protein.

[0118] In some embodiments, the Cas protein of a prime editor is a Class 2 Cas protein. In some embodiments, the Cas protein is a type II Cas protein. In some embodiments, the Cas protein is a Cas9 protein, a modified version of a Cas9 protein, a Cas9 protein homolog, mutant, variant, or a functional fragment thereof. As used herein, a Cas9, Cas9 protein, Cas9 polypeptide or a Cas9 nuclease refers to an RNA guided nuclease comprising one or more Cas9 nuclease domains and a Cas9 gRNA binding domain having the ability to bind a guide polynucleotide, e.g., a PEgRNA. A Cas9 protein may refer to a wild type Cas9 protein from any organism or a homolog, ortholog, or paralog from any organisms; any functional mutants or functional variants thereof; or any functional fragments or domains thereof. In some embodiments, a prime editor comprises a full-length Cas9 protein. In some embodiments, the Cas9 protein can generally comprises at least about 50%, 60%, 70%, 80%, 90%, 100% sequence identity to a wild type reference Cas9 protein (e.g., Cas9 from S. pyogenes). In some embodiments, the Cas9 comprises an amino acid change such as a deletion, insertion, substitution, fusion, chimera, or any combination thereof as compared to a wild type reference Cas9 protein.

[0119] In some embodiments, a Cas9 protein may comprise a Cas9 protein from Streptococcus pyogenes (Sp), Staphylococcus aureus (Sa), Streptococcus canis (Sc), Streptococcus thermophilus (St), Staphylococcus lugdunensis (Slu), Neisseria meningitidis (Nm), Campylobacter jejuni (Cj), Francisella novicida (Fn), or Treponema denticola (Td), or any Cas9 homolog or ortholog from an organism known in the art. In some embodiments, a Cas9 polypeptide is a SpCas9 polypeptide, e.g., comprising an amino acid sequence as set forth in NCBI Accession No. WP_038431314 or a fragment or variant thereof. In some embodiments, a Cas9 polypeptide is a SaCas9 polypeptide, e.g., comprising an amino acid sequence as set forth in Uniprot Accession No. J7RUA5 or a fragment or variant thereof. In some embodiments, a Cas9 polypeptide is a ScCas9 polypeptide, e.g., comprising an amino acid sequence as set forth in Uniprot Accession No. A0A3P5YA78 or a fragment or variant thereof. In some embodiments, a Cas9 polypeptide is a StCas9 polypeptide, e.g., comprising an amino acid sequence as set forth in NCBI Accession No. WP_007896501.1 or a fragment or variant thereof. In some embodiments, a Cas9 polypeptide is a SluCas9 polypeptide, e.g., comprising an amino acid sequence as set forth in any of NCBI Accession No. WP_230580236.1 or WP_250638315.1 or WP_242234150.1, WP_241435384.1, WP_002460848.1, KAK58371.1, or a fragment or variant thereof. In some embodiments, a Cas9 polypeptide is a NmCas9 polypeptide, e.g., comprising an amino acid sequence as set forth in any of NCBI Accession No. WP_002238326.1 or WP_061704949.1 or a fragment or variant thereof. In some embodiments, a Cas9 polypeptide is a CjCas9 polypeptide, e.g., comprising an amino acid sequence as set forth in any of NCBI Accession No. WP_100612036.1, WP_116882154.1, WP_116560509.1, WP_116484194.1, WP_116479303.1, WP_115794652.1, WP_100624872.1, or a fragment or variant thereof. In some embodiments, a Cas9 polypeptide is a FnCas9 polypeptide, e.g., comprising the amino acid sequence as set forth in Uniprot Accession No. AOQ5Y3 or a fragment or variant thereof. In some embodiments, a Cas9 polypeptide is a TdCas9 polypeptide, e.g., comprising the amino acid sequence as set forth in NCBI Accession No. WP_147625065.1 or a fragment or variant thereof. In some embodiments, a Cas9 polypeptide is a chimera comprising domains from two or more of the organisms described herein or those known in the art. In some embodiments, a Cas9 polypeptide is a Cas9 polypeptide from Streptococcus macacae, e.g., comprising the amino acid sequence as set forth in NCBI Accession No. WP_003079701.1 or a fragment or variant thereof. In some embodiments, a Cas9 polypeptide is a Cas9 polypeptide generated by replacing a PAM interaction domain of a SpCas9 with that of a Streptococcus macacae Cas9 (Spy-mac Cas9). Exemplary Cas sequences are provided in Table 54 below.

[0120] In some embodiments, a Cas9 protein comprises an amino acid sequence that is at least 50%, at least 60%, at least 70%, at least 75%, at least 80%, 85%, at least 86%, at least 87%, at least 88%, at least 89%, at least 90%, at least 91%, at least 92%, at least 93%, at least 94%, at least 95%, at least 96%, at least 97%, at least 98%, at least 99%, or 100% identical to any one of the sequences set forth in SEQ ID NOs: 7593, 7567, 7562, 7568, 7569, 7570, 7571-7592.

[0121] In some embodiments, a Cas9 protein is a Cas9 nickase that comprises an amino acid sequence that is at least 50%, at least 60%, at least 70%, at least 75%, at least 80%, 85%, at least 86%, at least 87%, at least 88%, at least 89%, at least 90%, at least 91%, at least 92%, at least 93%, at least 94%, at least 95%, at least 96%, at least 97%, at least 98%, at least 99%, or 100% identical to any one of the sequences set forth in SEQ ID NOs: 7593, 7562, 7568, 7570, 7571, 7573, 7574, 7576, 7577, 7579, 7580, 7582, 7583, 7585, 7586, 7588, 7589, 7591, and 7592 [0125]. In some embodiments, a Cas9 protein comprises an amino acid sequence that is selected from the group consisting of SEQ ID NOs: 7593, 7567, 7562, 7568, 7569, 7570, 7571-7592. In some embodiments, a prime editor comprises a Cas9 protein that comprises an amino acid sequence that lacks a N-terminus methionine relative to an amino acid sequence set forth in any one of SEQ ID NOs: 7567, 7562, 7569, 7570, 7572, 7573, 7575, 7576, 7578, 7579, 7581, 7582, 7587, 7588, 7590, 7591.

[0122] In some embodiments, the prime editing compositions or prime editing systems disclosed herein comprises a polynucleotide (e.g., a DNA, or an RNA, e.g., an mRNA) that encodes a Cas9 protein that comprises an amino acid sequence that is at least 50%, at least 60%, at least 70%, at least 75%, at least 80%, 85%, at least 86%, at least 87%, at least 88%, at least 89%, at least 90%, at least 91%, at least 92%, at least 93%, at least 94%, at least 95%, at least 96%, at least 97%, at least 98%, at least 99%, or 100% identical to any one of the sequences set forth in SEQ ID NOs: 7593, 7567, 7562, 7568, 7569, 7570, 7571-7592, set forth in Table 54 below.

TABLE 54
Exemplary Cas protein sequences

| SEQ | | |
|---|---|---|
| ID | Sequence | |
| NO: | description | Amino acid sequence |
| 7567 | wild type | MDKKYSIGLDIGTNSVGWAVITDEYKVPSKKFKVLGNTDRHSIKKNLIGALLFDSGE |
| | Streptococcus | TAEATRLKRTARRRYTRRKNRICYLQEIFSNEMAKVDDSFFHRLEESFLVEEDKKHE |
| | Pyogenes Cas9 | RHPIFGNIVDEVAYHEKYPTIYHLRKKLVDSTDKADLRLIYLALAHMIKFRGHFLIEG |
| | (SpCas9) | DLNPDNSDVDKLFIQLVQTYNQLFEENPINASGVDAKAILSARLSKSRRLENLIAQLP |
| | | GEKKNGLFGNLIALSLGLTPNFKSNFDLAEDAKLQLSKDTYDDDLDNLLAQIGDQY |
| | | ADLFLAAKNLSDAILLSDILRVNTEITKAPLSASMIKRYDEHHQDLTLLKALVRQQLP |
| | | EKYKEIFFDQSKNGYAGYIDGGASQEEFYKFIKPILEKMDGTEELLVKLNREDLLRK |
| | | QRTFDNGSIPHQIHLGELHAILRRQEDFYPFLKDNREKIEKILTFRIPYYVGPLARGNS |
| | | RFAWMTRKSEETITPWNFEEVVDKGASAQSFIERMTNFDKNLPNEKVLPKHSLLYE |
| | | YFTVYNELTKVKYVTEGMRKPAFLSGEQKKAIVDLLFKTNRKVTVKQLKEDYFKKI |
| | | ECFDSVEISGVEDRFNASLGTYHDLLKIIKDKDFLDNEENEDILEDIVLTLTLFEDREM |
| | | IEERLKTYAHLFDDKVMKQLKRRRYTGWGRLSRKLINGIRDKQSGKTILDFLKSDGF |
| | | ANRNFMQLIHDDSLTFKEDIQKAQVSGQGDSLHEHIANLAGSPAIKKGILQTVKVVD |
| | | ELVKVMGRHKPENIVIEMARENQTTQKGQKNSRERMKRIEEGIKELGSQILKEHPVE |
| | | NTQLQNEKLYLYYLQNGRDMYVDQELDINRLSDYDVDHIVPQSFLKDDSIDNKVLT |
| | | RSDKNRGKSDNVPSEEVVKKMKNYWRQLLNAKLITQRKFDNLTKAERGGLSELDK |
| | | AGFIKRQLVETRQITKHVAQILDSRMNTKYDENDKLIREVKVITLKSKLVSDFRKDF |
| | | QFYKVREINNYHHAHDAYLNAVVGTALIKKYPKLESEFVYGDYKVYDVRKMIAKS |
| | | EQEIGKATAKYFFYSNIMNFFKTEITLANGEIRKRPLIETNGETGEIVWDKGRDFATV |
| | | RKVLSMPQVNIVKKTEVQTGGFSKESILPKRNSDKLIARKKDWDPKKYGGFDSPTV |
| | | AYSVLVVAKVEKGKSKKLKSVKELLGITIMERSSFEKNPIDFLEAKGYKEVKKDLIIK |
| | | LPKYSLFELENGRKRMLASAGELQKGNELALPSKYVNFLYLASHYEKLKGSPEDNE |
| | | QKQLFVEQHKHYLDEIIEQISEFSKRVILADANLDKVLSAYNKHRDKPIREQAENIIH |
| | | LFTLTNLGAPAAFKYFDTTIDRKRYTSTKEVLDATLIHQSITGLYETRIDLSQLGGD |
| 7562 | SpCas9 H840A | MDKKYSIGLDIGTNSVGWAVITDEYKVPSKKFKVLGNTDRHSIKKNLIGALLFDSGE |
| | nickase | TAEATRLKRTARRRYTRRKNRICYLQEIFSNEMAKVDDSFFHRLEESFLVEEDKKHE |
| | | RHPIFGNIVDEVAYHEKYPTIYHLRKKLVDSTDKADLRLIYLALAHMIKFRGHFLIEG |
| | | DLNPDNSDVDKLFIQLVQTYNQLFEENPINASGVDAKAILSARLSKSRRLENLIAQLP |
| | | GEKKNGLFGNLIALSLGLTPNFKSNFDLAEDAKLQLSKDTYDDDLDNLLAQIGDQY |
| | | ADLFLAAKNLSDAILLSDILRVNTEITKAPLSASMIKRYDEHHQDLTLLKALVRQQLP |
| | | EKYKEIFFDQSKNGYAGYIDGGASQEEFYKFIKPILEKMDGTEELLVKLNREDLLRK |
| | | QRTFDNGSIPHQIHLGELHAILRRQEDFYPFLKDNREKIEKILTFRIPYYVGPLARGNS |
| | | RFAWMTRKSEETITPWNFEEVVDKGASAQSFIERMTNFDKNLPNEKVLPKHSLLYE |
| | | YFTVYNELTKVKYVTEGMRKPAFLSGEQKKAIVDLLFKTNRKVTVKQLKEDYFKKI |
| | | ECFDSVEISGVEDRFNASLGTYHDLLKIIKDKDFLDNEENEDILEDIVLTLTLFEDREM |
| | | IEERLKTYAHLFDDKVMKQLKRRRYTGWGRLSRKLINGIRDKQSGKTILDFLKSDGF |
| | | ANRNFMQLIHDDSLTFKEDIQKAQVSGQGDSLHEHIANLAGSPAIKKGILQTVKVVD |
| | | ELVKVMGRHKPENIVIEMARENQTTQKGQKNSRERMKRIEEGIKELGSQILKEHPVE |
| | | NTQLQNEKLYLYYLQNGRDMYVDQELDINRLSDYDVDAIVPQSFLKDDSIDNKVLT |
| | | RSDKNRGKSDNVPSEEVVKKMKNYWRQLLNAKLITQRKFDNLTKAERGGLSELDK |
| | | AGFIKRQLVETRQITKHVAQILDSRMNTKYDENDKLIREVKVITLKSKLVSDFRKDF |
| | | QFYKVREINNYHHAHDAYLNAVVGTALIKKYPKLESEFVYGDYKVYDVRKMIAKS |
| | | EQEIGKATAKYFFYSNIMNFFKTEITLANGEIRKRPLIETNGETGEIVWDKGRDFATV |
| | | RKVLSMPQVNIVKKTEVQTGGFSKESILPKRNSDKLIARKKDWDPKKYGGFDSPTV |
| | | AYSVLVVAKVEKGKSKKLKSVKELLGITIMERSSFEKNPIDFLEAKGYKEVKKDLIIK |
| | | LPKYSLFELENGRKRMLASAGELQKGNELALPSKYVNFLYLASHYEKLKGSPEDNE |
| | | QKQLFVEQHKHYLDEIIEQISEFSKRVILADANLDKVLSAYNKHRDKPIREQAENIIH |
| | | LFTLTNLGAPAAFKYFDTTIDRKRYTSTKEVLDATLIHQSITGLYETRIDLSQLGGD |
| 7568 | Met (−) SpCas9 | DKKYSIGLDIGTNSVGWAVITDEYKVPSKKFKVLGNTDRHSIKKNLIGALLFDSGET |
| | H839A nickase | AEATRLKRTARRRYTRRKNRICYLQEIFSNEMAKVDDSFFHRLEESFLVEEDKKHER |
| | | HPIFGNIVDEVAYHEKYPTIYHLRKKLVDSTDKADLRLIYLALAHMIKFRGHFLIEGD |
| | | LNPDNSDVDKLFIQLVQTYNQLFEENPINASGVDAKAILSARLSKSRRLENLIAQLPG |
| | | EKKNGLFGNLIALSLGLTPNFKSNFDLAEDAKLQLSKDTYDDDLDNLLAQIGDQYA |
| | | DLFLAAKNLSDAILLSDILRVNTEITKAPLSASMIKRYDEHHQDLTLLKALVRQQLPE |
| | | KYKEIFFDQSKNGYAGYIDGGASQEEFYKFIKPILEKMDGTEELLVKLNREDLLRKQ |
| | | RTFDNGSIPHQIHLGELHAILRRQEDFYPFLKDNREKIEKILTFRIPYYVGPLARGNSR |
| | | FAWMTRKSEETITPWNFEEVVDKGASAQSFIERMTNFDKNLPNEKVLPKHSLLYEY |
| | | FTVYNELTKVKYVTEGMRKPAFLSGEQKKAIVDLLFKTNRKVTVKQLKEDYFKKIE |
| | | CFDSVEISGVEDRFNASLGTYHDLLKIIKDKDFLDNEENEDILEDIVLTLTLFEDREMI |
| | | EERLKTYAHLFDDKVMKQLKRRRYTGWGRLSRKLINGIRDKQSGKTILDFLKSDGF |
| | | ANRNFMQLIHDDSLTFKEDIQKAQVSGQGDSLHEHIANLAGSPAIKKGILQTVKVVD |
| | | ELVKVMGRHKPENIVIEMARENQTTQKGQKNSRERMKRIEEGIKELGSQILKEHPVE |
| | | NTQLQNEKLYLYYLQNGRDMYVDQELDINRLSDYDVDAIVPQSFLKDDSIDNKVLT |
| | | RSDKNRGKSDNVPSEEVVKKMKNYWRQLLNAKLITQRKFDNLTKAERGGLSELDK |
| | | AGFIKRQLVETRQITKHVAQILDSRMNTKYDENDKLIREVKVITLKSKLVSDFRKDF |
| | | QFYKVREINNYHHAHDAYLNAVVGTALIKKYPKLESEFVYGDYKVYDVRKMIAKS |
| | | EQEIGKATAKYFFYSNIMNFFKTEITLANGEIRKRPLIETNGETGEIVWDKGRDFATV |
| | | RKVLSMPQVNIVKKTEVQTGGFSKESILPKRNSDKLIARKKDWDPKKYGGFDSPTV |
| | | AYSVLVVAKVEKGKSKKLKSVKELLGITIMERSSFEKNPIDFLEAKGYKEVKKDLIIK |
| | | LPKYSLFELENGRKRMLASAGELQKGNELALPSKYVNFLYLASHYEKLKGSPEDNE |
| | | QKQLFVEQHKHYLDEIIEQISEFSKRVILADANLDKVLSAYNKHRDKPIREQAENIIH |
| | | LFTLTNLGAPAAFKYFDTTIDRKRYTSTKEVLDATLIHQSITGLYETRIDLSQLGGD |
| 7569 | wild type | MNQKFILGLDIGITSVGYGLIDYETKNIIDAGVRLFPEANVENNEGRRSKRGSRRLKR |
| | Staphylococcus | RRIHRLERVKKLLEDYNLLDQSQIPQSTNPYAIRVKGLSEALSKDELVIALLHIAKRR |
| | lugdunensis | GIHKIDVIDSNDDVGNELSTKEQLNKNSKLLKDKFVCQIQLERMNEGQVRGEKNRF |
| | (Slu) Cas9 | KTADIIKEIIQLLNVQKNFHQLDENFINKYIELVEMRREYFEGPGKGSPYGWEGDPK |
| | | AWYETLMGHCTYFPDELRSVKYAYSADLFNALNDLNNLVIQRDGLSKLEYHEKYH |
| | | IIENVFKQKKKPTLKQIANEINVNPEDIKGYRITKSGKPQFTEFKLYHDLKSVLFDQSI |
| | | LENEDVLDQIAEILTIYQDKDSIKSKLTELDILLNEEDKENIAQLTGYTGTHRLSLKCI |
| | | RLVLEEQWYSSRNQMEIFTHLNIKPKKINLTAANKIPKAMIDEFILSPVVKRTFGQAI |
| | | NLINKIIEKYGVPEDIIIELARENNSKDKQKFINEMQKKNENTRKRINEIIGKYGNQNA |
| | | KRLVEKIRLHDEQEGKCLYSLESIPLEDLLNNPNHYEVDHIIPRSVSFDNSYHNKVLV |
| | | KQSENSKKSNLTPYQYFNSGKSKLSYNQFKQHILNLSKSQDRISKKKKEYLLEERDI |
| | | NKFEVQKEFINRNLVDTRYATRELTNYLKAYFSANNMNVKVKTINGSFTDYLRKV |
| | | WKFKKERNHGYKHHAEDALIIANADFLFKENKKLKAVNSVLEKPEIESKQLDIQVD |
| | | SEDNYSEMFIIPKQVQDIKDFRNFKYSHRVDKKPNRQLINDTLYSTRKKDNSTYIVQ |
| | | TIKDIYAKDNTTLKKQFDKSPEKFLMYQHDPRTFEKLEVIMKQYANEKNPLAKYHE |
| | | ETGEYLTKYSKKNNGPIVKSLKYIGNKLGSHLDVTHQFKSSTKKLVKLSIKPYRFDV |
| | | YLTDKGYKFITISYLDVLKKDNYYYIPEQKYDKLKLGKAIDKNAKFIASFYKNDLIK |
| | | LDGEIYKIIGVNSDTRNMIELDLPDIRYKEYCELNNIKGEPRIKKTIGKKVNSIEKLTT |
| | | DVLGNVFTNTQYTKPQLLFKRGN |
| 7570 | SluCas9 | MNQKFILGLDIGITSVGYGLIDYETKNIIDAGVRLFPEANVENNEGRRSKRGSRRLKR |
| | N582A nickase | RRIHRLERVKKLLEDYNLLDQSQIPQSTNPYAIRVKGLSEALSKDELVIALLHIAKRR |
| | | GIHKIDVIDSNDDVGNELSTKEQLNKNSKLLKDKFVCQIQLERMNEGQVRGEKNRF |
| | | KTADIIKEIIQLLNVQKNFHQLDENFINKYIELVEMRREYFEGPGKGSPYGWEGDPK |
| | | AWYETLMGHCTYFPDELRSVKYAYSADLFNALNDLNNLVIQRDGLSKLEYHEKYH |
| | | IIENVFKQKKKPTLKQIANEINVNPEDIKGYRITKSGKPQFTEFKLYHDLKSVLFDQSI |
| | | LENEDVLDQIAEILTIYQDKDSIKSKLTELDILLNEEDKENIAQLTGYTGTHRLSLKCI |
| | | RLVLEEQWYSSRNQMEIFTHLNIKPKKINLTAANKIPKAMIDEFILSPVVKRTFGQAI |
| | | NLINKIIEKYGVPEDIIIELARENNSKDKQKFINEMQKKNENTRKRINEIIGKYGNQNA |
| | | KRLVEKIRLHDEQEGKCLYSLESIPLEDLLNNPNHYEVDHIIPRSVSFDNSYHNKVLV |
| | | KQSEASKKSNLTPYQYFNSGKSKLSYNQFKQHILNLSKSQDRISKKKKEYLLEERDI |
| | | NKFEVQKEFINRNLVDTRYATRELTNYLKAYFSANNMNVKVKTINGSFTDYLRKV |
| | | WKFKKERNHGYKHHAEDALIIANADFLFKENKKLKAVNSVLEKPEIESKQLDIQVD |
| | | SEDNYSEMFIIPKQVQDIKDFRNFKYSHRVDKKPNRQLINDTLYSTRKKDNSTYIVQ |
| | | TIKDIYAKDNTTLKKQFDKSPEKFLMYQHDPRTFEKLEVIMKQYANEKNPLAKYHE |
| | | ETGEYLTKYSKKNNGPIVKSLKYIGNKLGSHLDVTHQFKSSTKKLVKLSIKPYRFDV |
| | | YLTDKGYKFITISYLDVLKKDNYYYIPEQKYDKLKLGKAIDKNAKFIASFYKNDLIK |
| | | LDGEIYKIIGVNSDTRNMIELDLPDIRYKEYCELNNIKGEPRIKKTIGKKVNSIEKLTT |
| | | DVLGNVFTNTQYTKPQLLFKRGN |
| 7571 | Met (−) | NQKFILGLDIGITSVGYGLIDYETKNIIDAGVRLFPEANVENNEGRRSKRGSRRLKRR |
| | SluCas9 | RIHRLERVKKLLEDYNLLDQSQIPQSTNPYAIRVKGLSEALSKDELVIALLHIAKRRGI |
| | nickase | HKIDVIDSNDDVGNELSTKEQLNKNSKLLKDKFVCQIQLERMNEGQVRGEKNRFKT |
| | | ADIIKEIIQLLNVQKNFHQLDENFINKYIELVEMRREYFEGPGKGSPYGWEGDPKAW |
| | | YETLMGHCTYFPDELRSVKYAYSADLFNALNDLNNLVIQRDGLSKLEYHEKYHIIE |
| | | NVFKQKKKPTLKQIANEINVNPEDIKGYRITKSGKPQFTEFKLYHDLKSVLFDQSILE |
| | | NEDVLDQIAEILTIYQDKDSIKSKLTELDILLNEEDKENIAQLTGYTGTHRLSLKCIRL |
| | | VLEEQWYSSRNQMEIFTHLNIKPKKINLTAANKIPKAMIDEFILSPVVKRTFGQAINLI |
| | | NKIIEKYGVPEDIIIELARENNSKDKQKFINEMQKKNENTRKRINEIIGKYGNQNAKR |
| | | LVEKIRLHDEQEGKCLYSLESIPLEDLLNNPNHYEVDHIIPRSVSFDNSYHNKVLVKQ |
| | | SEASKKSNLTPYQYFNSGKSKLSYNQFKQHILNLSKSQDRISKKKKEYLLEERDINKF |
| | | EVQKEFINRNLVDTRYATRELTNYLKAYFSANNMNVKVKTINGSFTDYLRKVWKF |
| | | KKERNHGYKHHAEDALIIANADFLFKENKKLKAVNSVLEKPEIESKQLDIQVDSEDN |
| | | YSEMFIIPKQVQDIKDFRNFKYSHRVDKKPNRQLINDTLYSTRKKDNSTYIVQTIKDI |
| | | YAKDNTTLKKQFDKSPEKFLMYQHDPRTFEKLEVIMKQYANEKNPLAKYHEETGE |
| | | YLTKYSKKNNGPIVKSLKYIGNKLGSHLDVTHQFKSSTKKLVKLSIKPYRFDVYLTD |
| | | KGYKFITISYLDVLKKDNYYYIPEQKYDKLKLGKAIDKNAKFIASFYKNDLIKLDGEI |
| | | YKIIGVNSDTRNMIELDLPDIRYKEYCELNNIKGEPRIKKTIGKKVNSIEKLTTDVLGN |
| | | VFTNTQYTKPQLLFKRGN |
| 7572 | Staphylococcus | MKRNYILGLDIGITSVGYGIIDYETRDVIDAGVRLFKEANVENNEGRRSKRGARRLK |
| | aureus Cas9 | RRRRHRIQRVKKLLFDYNLLTDHSELSGINPYEARVKGLSQKLSEEEFSAALLHLAK |
| | (SaCas9) | RRGVHNVNEVEEDTGNELSTKEQISRNSKALEEKYVAELQLERLKKDGEVRGSINR |
| | | FKTSDYVKEAKQLLKVQKAYHQLDQSFIDTYIDLLETRRTYYEGPGEGSPFGWKDI |
| | | KEWYEMLMGHCTYFPEELRSVKYAYNADLYNALNDLNNLVITRDENEKLEYYEKF |
| | | QIIENVFKQKKKPTLKQIAKEILVNEEDIKGYRVTSTGKPEFTNLKVYHDIKDITARK |
| | | EIIENAELLDQIAKILTIYQSSEDIQEELTNLNSELTQEEIEQISNLKGYTGTHNLSLKAI |
| | | NLILDELWHTNDNQIAIFNRLKLVPKKVDLSQQKEIPTTLVDDFILSPVVKRSFIQSIK |
| | | VINAIIKKYGLPNDIIIELAREKNSKDAQKMINEMQKRNRQTNERIEEIIRTTGKENAK |
| | | YLIEKIKLHDMQEGKCLYSLEAIPLEDLLNNPFNYEVDHIIPRSVSFDNSFNNKVLVK |
| | | QEENSKKGNRTPFQYLSSSDSKISYETFKKHILNLAKGKGRISKTKKEYLLEERDINR |
| | | FSVQKDFINRNLVDTRYATRGLMNLLRSYFRVNNLDVKVKSINGGFTSFLRRKWKF |
| | | KKERNKGYKHHAEDALIIANADFIFKEWKKLDKAKKVMENQMFEEKQAESMPEIE |
| | | TEQEYKEIFITPHQIKHIKDFKDYKYSHRVDKKPNRELINDTLYSTRKDDKGNTLIVN |
| | | NLNGLYDKDNDKLKKLINKSPEKLLMYHHDPQTYQKLKLIMEQYGDEKNPLYKYY |
| | | EETGNYLTKYSKKDNGPVIKKIKYYGNKLNAHLDITDDYPNSRNKVVKLSLKPYRF |
| | | DVYLDNGVYKFVTVKNLDVIKKENYYEVNSKCYEEAKKLKKISNQAEFIASFYNND |
| | | LIKINGELYRVIGVNNDLLNRIEVNMIDITYREYLENMNDKRPPRIIKTIASKTQSIKK |
| | | YSTDILGNLYEVKSKKHPQIIKKG |
| 7573 | SaCas9 N580A | MKRNYILGLDIGITSVGYGIIDYETRDVIDAGVRLFKEANVENNEGRRSKRGARRLK |
| | nickase | RRRRHRIQRVKKLLFDYNLLTDHSELSGINPYEARVKGLSQKLSEEEFSAALLHLAK |
| | | RRGVHNVNEVEEDTGNELSTKEQISRNSKALEEKYVAELQLERLKKDGEVRGSINR |
| | | FKTSDYVKEAKQLLKVQKAYHQLDQSFIDTYIDLLETRRTYYEGPGEGSPFGWKDI |
| | | KEWYEMLMGHCTYFPEELRSVKYAYNADLYNALNDLNNLVITRDENEKLEYYEKF |
| | | QIIENVFKQKKKPTLKQIAKEILVNEEDIKGYRVTSTGKPEFTNLKVYHDIKDITARK |
| | | EIIENAELLDQIAKILTIYQSSEDIQEELTNLNSELTQEEIEQISNLKGYTGTHNLSLKAI |
| | | NLILDELWHTNDNQIAIFNRLKLVPKKVDLSQQKEIPTTLVDDFILSPVVKRSFIQSIK |
| | | VINAIIKKYGLPNDIIIELAREKNSKDAQKMINEMQKRNRQTNERIEEIIRTTGKENAK |
| | | YLIEKIKLHDMQEGKCLYSLEAIPLEDLLNNPFNYEVDHIIPRSVSFDNSFNNKVLVK |
| | | QEEASKKGNRTPFQYLSSSDSKISYETFKKHILNLAKGKGRISKTKKEYLLEERDINR |
| | | FSVQKDFINRNLVDTRYATRGLMNLLRSYFRVNNLDVKVKSINGGFTSFLRRKWKF |
| | | KKERNKGYKHHAEDALIIANADFIFKEWKKLDKAKKVMENQMFEEKQAESMPEIE |
| | | TEQEYKEIFITPHQIKHIKDFKDYKYSHRVDKKPNRELINDTLYSTRKDDKGNTLIVN |
| | | NLNGLYDKDNDKLKKLINKSPEKLLMYHHDPQTYQKLKLIMEQYGDEKNPLYKYY |
| | | EETGNYLTKYSKKDNGPVIKKIKYYGNKLNAHLDITDDYPNSRNKVVKLSLKPYRF |
| | | DVYLDNGVYKFVTVKNLDVIKKENYYEVNSKCYEEAKKLKKISNQAEFIASFYNND |
| | | LIKINGELYRVIGVNNDLLNRIEVNMIDITYREYLENMNDKRPPRIIKTIASKTQSIKK |
| | | YSTDILGNLYEVKSKKHPQIIKKG |
| 7574 | Met (−) SaCas9 | KRNYILGLDIGITSVGYGIIDYETRDVIDAGVRLFKEANVENNEGRRSKRGARRLKR |
| | nickase | RRRHRIQRVKKLLFDYNLLTDHSELSGINPYEARVKGLSQKLSEEEFSAALLHLAKR |
| | | RGVHNVNEVEEDTGNELSTKEQISRNSKALEEKYVAELQLERLKKDGEVRGSINRF |
| | | KTSDYVKEAKQLLKVQKAYHQLDQSFIDTYIDLLETRRTYYEGPGEGSPFGWKDIK |
| | | EWYEMLMGHCTYFPEELRSVKYAYNADLYNALNDLNNLVITRDENEKLEYYEKFQ |
| | | IIENVFKQKKKPTLKQIAKEILVNEEDIKGYRVTSTGKPEFTNLKVYHDIKDITARKEI |
| | | IENAELLDQIAKILTIYQSSEDIQEELTNLNSELTQEEIEQISNLKGYTGTHNLSLKAIN |
| | | LILDELWHTNDNQIAIFNRLKLVPKKVDLSQQKEIPTTLVDDFILSPVVKRSFIQSIKVI |
| | | NAIIKKYGLPNDIIIELAREKNSKDAQKMINEMQKRNRQTNERIEEIIRTTGKENAKY |
| | | LIEKIKLHDMQEGKCLYSLEAIPLEDLLNNPFNYEVDHIIPRSVSFDNSFNNKVLVKQ |
| | | EEASKKGNRTPFQYLSSSDSKISYETFKKHILNLAKGKGRISKTKKEYLLEERDINRFS |
| | | VQKDFINRNLVDTRYATRGLMNLLRSYFRVNNLDVKVKSINGGFTSFLRRKWKFK |
| | | KERNKGYKHHAEDALIIANADFIFKEWKKLDKAKKVMENQMFEEKQAESMPEIETE |
| | | QEYKEIFITPHQIKHIKDFKDYKYSHRVDKKPNRELINDTLYSTRKDDKGNTLIVNNL |
| | | NGLYDKDNDKLKKLINKSPEKLLMYHHDPQTYQKLKLIMEQYGDEKNPLYKYYEE |
| | | TGNYLTKYSKKDNGPVIKKIKYYGNKLNAHLDITDDYPNSRNKVVKLSLKPYRFDV |
| | | YLDNGVYKFVTVKNLDVIKKENYYEVNSKCYEEAKKLKKISNQAEFIASFYNNDLI |
| | | KINGELYRVIGVNNDLLNRIEVNMIDITYREYLENMNDKRPPRIIKTIASKTQSIKKYS |
| | | TDILGNLYEVKSKKHPQIIKKG |
| 7575 | SpCas9-NG | MDKKYSIGLDIGTNSVGWAVITDEYKVPSKKFKVLGNTDRHSIKKNLIGALLFDSGE |
| | (VRVRFRR) | TAEATRLKRTARRRYTRRKNRICYLQEIFSNEMAKVDDSFFHRLEESFLVEEDKKHE |
| | | RHPIFGNIVDEVAYHEKYPTIYHLRKKLVDSTDKADLRLIYLALAHMIKFRGHFLIEG |
| | | DLNPDNSDVDKLFIQLVQTYNQLFEENPINASGVDAKAILSARLSKSRRLENLIAQLP |
| | | GEKKNGLFGNLIALSLGLTPNFKSNFDLAEDAKLQLSKDTYDDDLDNLLAQIGDQY |
| | | ADLFLAAKNLSDAILLSDILRVNTEITKAPLSASMIKRYDEHHQDLTLLKALVRQQLP |
| | | EKYKEIFFDQSKNGYAGYIDGGASQEEFYKFIKPILEKMDGTEELLVKLNREDLLRK |
| | | QRTFDNGSIPHQIHLGELHAILRRQEDFYPFLKDNREKIEKILTFRIPYYVGPLARGNS |
| | | RFAWMTRKSEETITPWNFEEVVDKGASAQSFIERMTNFDKNLPNEKVLPKHSLLYE |
| | | YFTVYNELTKVKYVTEGMRKPAFLSGEQKKAIVDLLFKTNRKVTVKQLKEDYFKKI |
| | | ECFDSVEISGVEDRFNASLGTYHDLLKIIKDKDFLDNEENEDILEDIVLTLTLFEDREM |
| | | IEERLKTYAHLFDDKVMKQLKRRRYTGWGRLSRKLINGIRDKQSGKTILDFLKSDGF |
| | | ANRNFMQLIHDDSLTFKEDIQKAQVSGQGDSLHEHIANLAGSPAIKKGILQTVKVVD |
| | | ELVKVMGRHKPENIVIEMARENQTTQKGQKNSRERMKRIEEGIKELGSQILKEHPVE |
| | | NTQLQNEKLYLYYLQNGRDMYVDQELDINRLSDYDVDHIVPQSFLKDDSIDNKVLT |
| | | RSDKNRGKSDNVPSEEVVKKMKNYWRQLLNAKLITQRKFDNLTKAERGGLSELDK |
| | | AGFIKRQLVETRQITKHVAQILDSRMNTKYDENDKLIREVKVITLKSKLVSDFRKDF |
| | | QFYKVREINNYHHAHDAYLNAVVGTALIKKYPKLESEFVYGDYKVYDVRKMIAKS |
| | | EQEIGKATAKYFFYSNIMNFFKTEITLANGEIRKRPLIETNGETGEIVWDKGRDFATV |
| | | RKVLSMPQVNIVKKTEVQTGGFSKESIRPKRNSDKLIARKKDWDPKKYGGFVSPTV |
| | | AYSVLVVAKVEKGKSKKLKSVKELLGITIMERSSFEKNPIDFLEAKGYKEVKKDLIIK |
| | | LPKYSLFELENGRKRMLASARFLQKGNELALPSKYVNFLYLASHYEKLKGSPEDNE |
| | | QKQLFVEQHKHYLDEIIEQISEFSKRVILADANLDKVLSAYNKHRDKPIREQAENIIH |
| | | LFTLTNLGAPRAFKYFDTTIDRKVYRSTKEVLDATLIHQSITGLYETRIDLSQLGGD |
| 7576 | spCas9-NG | MDKKYSIGLDIGTNSVGWAVITDEYKVPSKKFKVLGNTDRHSIKKNLIGALLFDSGE |
| | (H840A_VRVRFRR) | TAEATRLKRTARRRYTRRKNRICYLQEIFSNEMAKVDDSFFHRLEESFLVEEDKKHE |
| | Nickase | RHPIFGNIVDEVAYHEKYPTIYHLRKKLVDSTDKADLRLIYLALAHMIKFRGHFLIEG |
| | | DLNPDNSDVDKLFIQLVQTYNQLFEENPINASGVDAKAILSARLSKSRRLENLIAQLP |
| | | GEKKNGLFGNLIALSLGLTPNFKSNFDLAEDAKLQLSKDTYDDDLDNLLAQIGDQY |
| | | ADLFLAAKNLSDAILLSDILRVNTEITKAPLSASMIKRYDEHHQDLTLLKALVRQQLP |
| | | EKYKEIFFDQSKNGYAGYIDGGASQEEFYKFIKPILEKMDGTEELLVKLNREDLLRK |
| | | QRTFDNGSIPHQIHLGELHAILRRQEDFYPFLKDNREKIEKILTFRIPYYVGPLARGNS |
| | | RFAWMTRKSEETITPWNFEEVVDKGASAQSFIERMTNFDKNLPNEKVLPKHSLLYE |
| | | YFTVYNELTKVKYVTEGMRKPAFLSGEQKKAIVDLLFKTNRKVTVKQLKEDYFKKI |
| | | ECFDSVEISGVEDRFNASLGTYHDLLKIIKDKDFLDNEENEDILEDIVLTLTLFEDREM |
| | | IEERLKTYAHLFDDKVMKQLKRRRYTGWGRLSRKLINGIRDKQSGKTILDFLKSDGF |
| | | ANRNFMQLIHDDSLTFKEDIQKAQVSGQGDSLHEHIANLAGSPAIKKGILQTVKVVD |
| | | ELVKVMGRHKPENIVIEMARENQTTQKGQKNSRERMKRIEEGIKELGSQILKEHPVE |
| | | NTQLQNEKLYLYYLQNGRDMYVDQELDINRLSDYDVDAIVPQSFLKDDSIDNKVLT |
| | | RSDKNRGKSDNVPSEEVVKKMKNYWRQLLNAKLITQRKFDNLTKAERGGLSELDK |
| | | AGFIKRQLVETRQITKHVAQILDSRMNTKYDENDKLIREVKVITLKSKLVSDFRKDF |
| | | QFYKVREINNYHHAHDAYLNAVVGTALIKKYPKLESEFVYGDYKVYDVRKMIAKS |
| | | EQEIGKATAKYFFYSNIMNFFKTEITLANGEIRKRPLIETNGETGEIVWDKGRDFATV |
| | | RKVLSMPQVNIVKKTEVQTGGFSKESIRPKRNSDKLIARKKDWDPKKYGGFVSPTV |
| | | AYSVLVVAKVEKGKSKKLKSVKELLGITIMERSSFEKNPIDFLEAKGYKEVKKDLIIK |
| | | LPKYSLFELENGRKRMLASARFLQKGNELALPSKYVNFLYLASHYEKLKGSPEDNE |
| | | QKQLFVEQHKHYLDEIIEQISEFSKRVILADANLDKVLSAYNKHRDKPIREQAENIIH |
| | | LFTLTNLGAPRAFKYFDTTIDRKVYRSTKEVLDATLIHQSITGLYETRIDLSQLGGD |
| 7577 | Met (−) | DKKYSIGLDIGTNSVGWAVITDEYKVPSKKFKVLGNTDRHSIKKNLIGALLFDSGET |
| | SpCas9-NG | AEATRLKRTARRRYTRRKNRICYLQEIFSNEMAKVDDSFFHRLEESFLVEEDKKHER |
| | Nickase | HPIFGNIVDEVAYHEKYPTIYHLRKKLVDSTDKADLRLIYLALAHMIKFRGHFLIEGD |
| | | LNPDNSDVDKLFIQLVQTYNQLFEENPINASGVDAKAILSARLSKSRRLENLIAQLPG |
| | | EKKNGLFGNLIALSLGLTPNFKSNFDLAEDAKLQLSKDTYDDDLDNLLAQIGDQYA |
| | | DLFLAAKNLSDAILLSDILRVNTEITKAPLSASMIKRYDEHHQDLTLLKALVRQQLPE |
| | | KYKEIFFDQSKNGYAGYIDGGASQEEFYKFIKPILEKMDGTEELLVKLNREDLLRKQ |
| | | RTFDNGSIPHQIHLGELHAILRRQEDFYPFLKDNREKIEKILTFRIPYYVGPLARGNSR |
| | | FAWMTRKSEETITPWNFEEVVDKGASAQSFIERMTNFDKNLPNEKVLPKHSLLYEY |
| | | FTVYNELTKVKYVTEGMRKPAFLSGEQKKAIVDLLFKTNRKVTVKQLKEDYFKKIE |
| | | CFDSVEISGVEDRFNASLGTYHDLLKIIKDKDFLDNEENEDILEDIVLTLTLFEDREMI |
| | | EERLKTYAHLFDDKVMKQLKRRRYTGWGRLSRKLINGIRDKQSGKTILDFLKSDGF |
| | | ANRNFMQLIHDDSLTFKEDIQKAQVSGQGDSLHEHIANLAGSPAIKKGILQTVKVVD |
| | | ELVKVMGRHKPENIVIEMARENQTTQKGQKNSRERMKRIEEGIKELGSQILKEHPVE |
| | | NTQLQNEKLYLYYLQNGRDMYVDQELDINRLSDYDVDAIVPQSFLKDDSIDNKVLT |
| | | RSDKNRGKSDNVPSEEVVKKMKNYWRQLLNAKLITQRKFDNLTKAERGGLSELDK |
| | | AGFIKRQLVETRQITKHVAQILDSRMNTKYDENDKLIREVKVITLKSKLVSDFRKDF |
| | | QFYKVREINNYHHAHDAYLNAVVGTALIKKYPKLESEFVYGDYKVYDVRKMIAKS |
| | | EQEIGKATAKYFFYSNIMNFFKTEITLANGEIRKRPLIETNGETGEIVWDKGRDFATV |
| | | RKVLSMPQVNIVKKTEVQTGGFSKESIRPKRNSDKLIARKKDWDPKKYGGFVSPTV |
| | | AYSVLVVAKVEKGKSKKLKSVKELLGITIMERSSFEKNPIDFLEAKGYKEVKKDLIIK |
| | | LPKYSLFELENGRKRMLASARFLQKGNELALPSKYVNFLYLASHYEKLKGSPEDNE |
| | | QKQLFVEQHKHYLDEIIEQISEFSKRVILADANLDKVLSAYNKHRDKPIREQAENIIH |
| | | LFTLTNLGAPRAFKYFDTTIDRKVYRSTKEVLDATLIHQSITGLYETRIDLSQLGGD |
| 7578 | spCas9-NGA | MDKKYSIGLDIGTNSVGWAVITDEYKVPSKKFKVLGNTDRHSIKKNLIGALLFDSGE |
| | (VRQR) | TAEATRLKRTARRRYTRRKNRICYLQEIFSNEMAKVDDSFFHRLEESFLVEEDKKHE |
| | | RHPIFGNIVDEVAYHEKYPTIYHLRKKLVDSTDKADLRLIYLALAHMIKFRGHFLIEG |
| | | DLNPDNSDVDKLFIQLVQTYNQLFEENPINASGVDAKAILSARLSKSRRLENLIAQLP |
| | | GEKKNGLFGNLIALSLGLTPNFKSNFDLAEDAKLQLSKDTYDDDLDNLLAQIGDQY |
| | | ADLFLAAKNLSDAILLSDILRVNTEITKAPLSASMIKRYDEHHQDLTLLKALVRQQLP |
| | | EKYKEIFFDQSKNGYAGYIDGGASQEEFYKFIKPILEKMDGTEELLVKLNREDLLRK |
| | | QRTFDNGSIPHQIHLGELHAILRRQEDFYPFLKDNREKIEKILTFRIPYYVGPLARGNS |
| | | RFAWMTRKSEETITPWNFEEVVDKGASAQSFIERMTNFDKNLPNEKVLPKHSLLYE |
| | | YFTVYNELTKVKYVTEGMRKPAFLSGEQKKAIVDLLFKTNRKVTVKQLKEDYFKKI |
| | | ECFDSVEISGVEDRFNASLGTYHDLLKIIKDKDFLDNEENEDILEDIVLTLTLFEDREM |
| | | IEERLKTYAHLFDDKVMKQLKRRRYTGWGRLSRKLINGIRDKQSGKTILDFLKSDGF |
| | | ANRNFMQLIHDDSLTFKEDIQKAQVSGQGDSLHEHIANLAGSPAIKKGILQTVKVVD |
| | | ELVKVMGRHKPENIVIEMARENQTTQKGQKNSRERMKRIEEGIKELGSQILKEHPVE |
| | | NTQLQNEKLYLYYLQNGRDMYVDQELDINRLSDYDVDHIVPQSFLKDDSIDNKVLT |
| | | RSDKNRGKSDNVPSEEVVKKMKNYWRQLLNAKLITQRKFDNLTKAERGGLSELDK |
| | | AGFIKRQLVETRQITKHVAQILDSRMNTKYDENDKLIREVKVITLKSKLVSDFRKDF |
| | | QFYKVREINNYHHAHDAYLNAVVGTALIKKYPKLESEFVYGDYKVYDVRKMIAKS |
| | | EQEIGKATAKYFFYSNIMNFFKTEITLANGEIRKRPLIETNGETGEIVWDKGRDFATV |
| | | RKVLSMPQVNIVKKTEVQTGGFSKESILPKRNSDKLIARKKDWDPKKYGGFVSPTV |
| | | AYSVLVVAKVEKGKSKKLKSVKELLGITIMERSSFEKNPIDFLEAKGYKEVKKDLIIK |
| | | LPKYSLFELENGRKRMLASARELQKGNELALPSKYVNFLYLASHYEKLKGSPEDNE |
| | | QKQLFVEQHKHYLDEIIEQISEFSKRVILADANLDKVLSAYNKHRDKPIREQAENIIH |
| | | LFTLTNLGAPAAFKYFDTTIDRKQYRSTKEVLDATLIHQSITGLYETRIDLSQLGGD |
| 7579 | spCas9-NGA | MDKKYSIGLDIGTNSVGWAVITDEYKVPSKKFKVLGNTDRHSIKKNLIGALLFDSGE |
| | (H840A_VRQR) | TAEATRLKRTARRRYTRRKNRICYLQEIFSNEMAKVDDSFFHRLEESFLVEEDKKHE |
| | Nickase | RHPIFGNIVDEVAYHEKYPTIYHLRKKLVDSTDKADLRLIYLALAHMIKFRGHFLIEG |
| | | DLNPDNSDVDKLFIQLVQTYNQLFEENPINASGVDAKAILSARLSKSRRLENLIAQLP |
| | | GEKKNGLFGNLIALSLGLTPNFKSNFDLAEDAKLQLSKDTYDDDLDNLLAQIGDQY |
| | | ADLFLAAKNLSDAILLSDILRVNTEITKAPLSASMIKRYDEHHQDLTLLKALVRQQLP |
| | | EKYKEIFFDQSKNGYAGYIDGGASQEEFYKFIKPILEKMDGTEELLVKLNREDLLRK |
| | | QRTFDNGSIPHQIHLGELHAILRRQEDFYPFLKDNREKIEKILTFRIPYYVGPLARGNS |
| | | RFAWMTRKSEETITPWNFEEVVDKGASAQSFIERMTNFDKNLPNEKVLPKHSLLYE |
| | | YFTVYNELTKVKYVTEGMRKPAFLSGEQKKAIVDLLFKTNRKVTVKQLKEDYFKKI |
| | | ECFDSVEISGVEDRFNASLGTYHDLLKIIKDKDFLDNEENEDILEDIVLTLTLFEDREM |
| | | IEERLKTYAHLFDDKVMKQLKRRRYTGWGRLSRKLINGIRDKQSGKTILDFLKSDGF |
| | | ANRNFMQLIHDDSLTFKEDIQKAQVSGQGDSLHEHIANLAGSPAIKKGILQTVKVVD |
| | | ELVKVMGRHKPENIVIEMARENQTTQKGQKNSRERMKRIEEGIKELGSQILKEHPVE |
| | | NTQLQNEKLYLYYLQNGRDMYVDQELDINRLSDYDVDAIVPQSFLKDDSIDNKVLT |
| | | RSDKNRGKSDNVPSEEVVKKMKNYWRQLLNAKLITQRKFDNLTKAERGGLSELDK |
| | | AGFIKRQLVETRQITKHVAQILDSRMNTKYDENDKLIREVKVITLKSKLVSDFRKDF |
| | | QFYKVREINNYHHAHDAYLNAVVGTALIKKYPKLESEFVYGDYKVYDVRKMIAKS |
| | | EQEIGKATAKYFFYSNIMNFFKTEITLANGEIRKRPLIETNGETGEIVWDKGRDFATV |
| | | RKVLSMPQVNIVKKTEVQTGGFSKESILPKRNSDKLIARKKDWDPKKYGGFVSPTV |
| | | AYSVLVVAKVEKGKSKKLKSVKELLGITIMERSSFEKNPIDFLEAKGYKEVKKDLIIK |
| | | LPKYSLFELENGRKRMLASARELQKGNELALPSKYVNFLYLASHYEKLKGSPEDNE |
| | | QKQLFVEQHKHYLDEIIEQISEFSKRVILADANLDKVLSAYNKHRDKPIREQAENIIH |
| | | LFTLTNLGAPAAFKYFDTTIDRKQYRSTKEVLDATLIHQSITGLYETRIDLSQLGGD |
| 7580 | Met(−) spCas9- | DKKYSIGLDIGTNSVGWAVITDEYKVPSKKFKVLGNTDRHSIKKNLIGALLFDSGET |
| | NGA Nickase | AEATRLKRTARRRYTRRKNRICYLQEIFSNEMAKVDDSFFHRLEESFLVEEDKKHER |
| | | HPIFGNIVDEVAYHEKYPTIYHLRKKLVDSTDKADLRLIYLALAHMIKFRGHFLIEGD |
| | | LNPDNSDVDKLFIQLVQTYNQLFEENPINASGVDAKAILSARLSKSRRLENLIAQLPG |
| | | EKKNGLFGNLIALSLGLTPNFKSNFDLAEDAKLQLSKDTYDDDLDNLLAQIGDQYA |
| | | DLFLAAKNLSDAILLSDILRVNTEITKAPLSASMIKRYDEHHQDLTLLKALVRQQLPE |
| | | KYKEIFFDQSKNGYAGYIDGGASQEEFYKFIKPILEKMDGTEELLVKLNREDLLRKQ |
| | | RTFDNGSIPHQIHLGELHAILRRQEDFYPFLKDNREKIEKILTFRIPYYVGPLARGNSR |
| | | FAWMTRKSEETITPWNFEEVVDKGASAQSFIERMTNFDKNLPNEKVLPKHSLLYEY |
| | | FTVYNELTKVKYVTEGMRKPAFLSGEQKKAIVDLLFKTNRKVTVKQLKEDYFKKIE |
| | | CFDSVEISGVEDRFNASLGTYHDLLKIIKDKDFLDNEENEDILEDIVLTLTLFEDREMI |
| | | EERLKTYAHLFDDKVMKQLKRRRYTGWGRLSRKLINGIRDKQSGKTILDFLKSDGF |
| | | ANRNFMQLIHDDSLTFKEDIQKAQVSGQGDSLHEHIANLAGSPAIKKGILQTVKVVD |
| | | ELVKVMGRHKPENIVIEMARENQTTQKGQKNSRERMKRIEEGIKELGSQILKEHPVE |
| | | NTQLQNEKLYLYYLQNGRDMYVDQELDINRLSDYDVDAIVPQSFLKDDSIDNKVLT |
| | | RSDKNRGKSDNVPSEEVVKKMKNYWRQLLNAKLITQRKFDNLTKAERGGLSELDK |
| | | AGFIKRQLVETRQITKHVAQILDSRMNTKYDENDKLIREVKVITLKSKLVSDFRKDF |
| | | QFYKVREINNYHHAHDAYLNAVVGTALIKKYPKLESEFVYGDYKVYDVRKMIAKS |
| | | EQEIGKATAKYFFYSNIMNFFKTEITLANGEIRKRPLIETNGETGEIVWDKGRDFATV |
| | | RKVLSMPQVNIVKKTEVQTGGFSKESILPKRNSDKLIARKKDWDPKKYGGFVSPTV |
| | | AYSVLVVAKVEKGKSKKLKSVKELLGITIMERSSFEKNPIDFLEAKGYKEVKKDLIIK |
| | | LPKYSLFELENGRKRMLASARELQKGNELALPSKYVNFLYLASHYEKLKGSPEDNE |
| | | QKQLFVEQHKHYLDEIIEQISEFSKRVILADANLDKVLSAYNKHRDKPIREQAENIIH |
| | | LFTLTNLGAPAAFKYFDTTIDRKQYRSTKEVLDATLIHQSITGLYETRIDLSQLGGD |
| 7581 | SpRY Cas9 | MDKKYSIGLDIGTNSVGWAVITDEYKVPSKKFKVLGNTDRHSIKKNLIGALLFDSGE |
| | | TAERTRLKRTARRRYTRRKNRICYLQEIFSNEMAKVDDSFFHRLEESFLVEEDKKHE |
| | | RHPIFGNIVDEVAYHEKYPTIYHLRKKLVDSTDKADLRLIYLALAHMIKFRGHFLIEG |
| | | DLNPDNSDVDKLFIQLVQTYNQLFEENPINASGVDAKAILSARLSKSRRLENLIAQLP |
| | | GEKKNGLFGNLIALSLGLTPNFKSNFDLAEDAKLQLSKDTYDDDLDNLLAQIGDQY |
| | | ADLFLAAKNLSDAILLSDILRVNTEITKAPLSASMIKRYDEHHQDLTLLKALVRQQLP |
| | | EKYKEIFFDQSKNGYAGYIDGGASQEEFYKFIKPILEKMDGTEELLVKLNREDLLRK |
| | | QRTFDNGSIPHQIHLGELHAILRRQEDFYPFLKDNREKIEKILTFRIPYYVGPLARGNS |
| | | RFAWMTRKSEETITPWNFEEVVDKGASAQSFIERMTNFDKNLPNEKVLPKHSLLYE |
| | | YFTVYNELTKVKYVTEGMRKPAFLSGEQKKAIVDLLFKTNRKVTVKQLKEDYFKKI |
| | | ECFDSVEISGVEDRFNASLGTYHDLLKIIKDKDFLDNEENEDILEDIVLTLTLFEDREM |
| | | IEERLKTYAHLFDDKVMKQLKRRRYTGWGRLSRKLINGIRDKQSGKTILDFLKSDGF |
| | | ANRNFMQLIHDDSLTFKEDIQKAQVSGQGDSLHEHIANLAGSPAIKKGILQTVKVVD |
| | | ELVKVMGRHKPENIVIEMARENQTTQKGQKNSRERMKRIEEGIKELGSQILKEHPVE |
| | | NTQLQNEKLYLYYLQNGRDMYVDQELDINRLSDYDVDHIVPQSFLKDDSIDNKVLT |
| | | RSDKNRGKSDNVPSEEVVKKMKNYWRQLLNAKLITQRKFDNLTKAERGGLSELDK |
| | | AGFIKRQLVETRQITKHVAQILDSRMNTKYDENDKLIREVKVITLKSKLVSDFRKDF |
| | | QFYKVREINNYHHAHDAYLNAVVGTALIKKYPKLESEFVYGDYKVYDVRKMIAKS |
| | | EQEIGKATAKYFFYSNIMNFFKTEITLANGEIRKRPLIETNGETGEIVWDKGRDFATV |
| | | RKVLSMPQVNIVKKTEVQTGGFSKESIRPKRNSDKLIARKKDWDPKKYGGFLWPTV |
| | | AYSVLVVAKVEKGKSKKLKSVKELLGITIMERSSFEKNPIDFLEAKGYKEVKKDLIIK |
| | | LPKYSLFELENGRKRMLASAKQLQKGNELALPSKYVNFLYLASHYEKLKGSPEDNE |
| | | QKQLFVEQHKHYLDEIIEQISEFSKRVILADANLDKVLSAYNKHRDKPIREQAENIIH |
| | | LFTLTRLGAPRAFKYFDTTIDPKQYRSTKEVLDATLIHQSITGLYETRIDLSQLGGD |
| 7582 | SpRY Cas9 | MDKKYSIGLDIGTNSVGWAVITDEYKVPSKKFKVLGNTDRHSIKKNLIGALLFDSGE |
| | (H840A) | TAERTRLKRTARRRYTRRKNRICYLQEIFSNEMAKVDDSFFHRLEESFLVEEDKKHE |
| | Nickase | RHPIFGNIVDEVAYHEKYPTIYHLRKKLVDSTDKADLRLIYLALAHMIKFRGHFLIEG |
| | | DLNPDNSDVDKLFIQLVQTYNQLFEENPINASGVDAKAILSARLSKSRRLENLIAQLP |
| | | GEKKNGLFGNLIALSLGLTPNFKSNFDLAEDAKLQLSKDTYDDDLDNLLAQIGDQY |
| | | ADLFLAAKNLSDAILLSDILRVNTEITKAPLSASMIKRYDEHHQDLTLLKALVRQQLP |
| | | EKYKEIFFDQSKNGYAGYIDGGASQEEFYKFIKPILEKMDGTEELLVKLNREDLLRK |
| | | QRTFDNGSIPHQIHLGELHAILRRQEDFYPFLKDNREKIEKILTFRIPYYVGPLARGNS |
| | | RFAWMTRKSEETITPWNFEEVVDKGASAQSFIERMTNFDKNLPNEKVLPKHSLLYE |
| | | YFTVYNELTKVKYVTEGMRKPAFLSGEQKKAIVDLLFKTNRKVTVKQLKEDYFKKI |
| | | ECFDSVEISGVEDRFNASLGTYHDLLKIIKDKDFLDNEENEDILEDIVLTLTLFEDREM |
| | | IEERLKTYAHLFDDKVMKQLKRRRYTGWGRLSRKLINGIRDKQSGKTILDFLKSDGF |
| | | ANRNFMQLIHDDSLTFKEDIQKAQVSGQGDSLHEHIANLAGSPAIKKGILQTVKVVD |
| | | ELVKVMGRHKPENIVIEMARENQTTQKGQKNSRERMKRIEEGIKELGSQILKEHPVE |
| | | NTQLQNEKLYLYYLQNGRDMYVDQELDINRLSDYDVDAIVPQSFLKDDSIDNKVLT |
| | | RSDKNRGKSDNVPSEEVVKKMKNYWRQLLNAKLITQRKFDNLTKAERGGLSELDK |
| | | AGFIKRQLVETRQITKHVAQILDSRMNTKYDENDKLIREVKVITLKSKLVSDFRKDF |
| | | QFYKVREINNYHHAHDAYLNAVVGTALIKKYPKLESEFVYGDYKVYDVRKMIAKS |
| | | EQEIGKATAKYFFYSNIMNFFKTEITLANGEIRKRPLIETNGETGEIVWDKGRDFATV |
| | | RKVLSMPQVNIVKKTEVQTGGFSKESIRPKRNSDKLIARKKDWDPKKYGGFLWPTV |
| | | AYSVLVVAKVEKGKSKKLKSVKELLGITIMERSSFEKNPIDFLEAKGYKEVKKDLIIK |
| | | LPKYSLFELENGRKRMLASAKQLQKGNELALPSKYVNFLYLASHYEKLKGSPEDNE |
| | | QKQLFVEQHKHYLDEIIEQISEFSKRVILADANLDKVLSAYNKHRDKPIREQAENIIH |
| | | LFTLTRLGAPRAFKYFDTTIDPKQYRSTKEVLDATLIHQSITGLYETRIDLSQLGGD |
| 7583 | Met(−) SpRY | DKKYSIGLDIGTNSVGWAVITDEYKVPSKKFKVLGNTDRHSIKKNLIGALLFDSGET |
| | Cas9 Nickase | AERTRLKRTARRRYTRRKNRICYLQEIFSNEMAKVDDSFFHRLEESFLVEEDKKHER |
| | | HPIFGNIVDEVAYHEKYPTIYHLRKKLVDSTDKADLRLIYLALAHMIKFRGHFLIEGD |
| | | LNPDNSDVDKLFIQLVQTYNQLFEENPINASGVDAKAILSARLSKSRRLENLIAQLPG |
| | | EKKNGLFGNLIALSLGLTPNFKSNFDLAEDAKLQLSKDTYDDDLDNLLAQIGDQYA |
| | | DLFLAAKNLSDAILLSDILRVNTEITKAPLSASMIKRYDEHHQDLTLLKALVRQQLPE |
| | | KYKEIFFDQSKNGYAGYIDGGASQEEFYKFIKPILEKMDGTEELLVKLNREDLLRKQ |
| | | RTFDNGSIPHQIHLGELHAILRRQEDFYPFLKDNREKIEKILTFRIPYYVGPLARGNSR |
| | | FAWMTRKSEETITPWNFEEVVDKGASAQSFIERMTNFDKNLPNEKVLPKHSLLYEY |
| | | FTVYNELTKVKYVTEGMRKPAFLSGEQKKAIVDLLFKTNRKVTVKQLKEDYFKKIE |
| | | CFDSVEISGVEDRFNASLGTYHDLLKIIKDKDFLDNEENEDILEDIVLTLTLFEDREMI |
| | | EERLKTYAHLFDDKVMKQLKRRRYTGWGRLSRKLINGIRDKQSGKTILDFLKSDGF |
| | | ANRNFMQLIHDDSLTFKEDIQKAQVSGQGDSLHEHIANLAGSPAIKKGILQTVKVVD |
| | | ELVKVMGRHKPENIVIEMARENQTTQKGQKNSRERMKRIEEGIKELGSQILKEHPVE |
| | | NTQLQNEKLYLYYLQNGRDMYVDQELDINRLSDYDVDAIVPQSFLKDDSIDNKVLT |
| | | RSDKNRGKSDNVPSEEVVKKMKNYWRQLLNAKLITQRKFDNLTKAERGGLSELDK |
| | | AGFIKRQLVETRQITKHVAQILDSRMNTKYDENDKLIREVKVITLKSKLVSDFRKDF |
| | | QFYKVREINNYHHAHDAYLNAVVGTALIKKYPKLESEFVYGDYKVYDVRKMIAKS |
| | | EQEIGKATAKYFFYSNIMNFFKTEITLANGEIRKRPLIETNGETGEIVWDKGRDFATV |
| | | RKVLSMPQVNIVKKTEVQTGGFSKESIRPKRNSDKLIARKKDWDPKKYGGFLWPTV |
| | | AYSVLVVAKVEKGKSKKLKSVKELLGITIMERSSFEKNPIDFLEAKGYKEVKKDLIIK |
| | | LPKYSLFELENGRKRMLASAKQLQKGNELALPSKYVNFLYLASHYEKLKGSPEDNE |
| | | QKQLFVEQHKHYLDEIIEQISEFSKRVILADANLDKVLSAYNKHRDKPIREQAENIIH |
| | | LFTLTRLGAPRAFKYFDTTIDPKQYRSTKEVLDATLIHQSITGLYETRIDLSQLGGD |
| 7584 | sRGN3.1 | MNQKFILGLDIGITSVGYGLIDYETKNIIDAGVRLFPEANVENNEGRRSKRGSRRLKR |
| | | RRIHRLERVKLLLTEYDLINKEQIPTSNNPYQIRVKGLSEILSKDELAIALLHLAKRRG |
| | | IHNVDVAADKEETASDSLSTKDQINKNAKFLESRYVCELQKERLENEGHVRGVENR |
| | | FLTKDIVREAKKIIDTQMQYYPEIDETFKEKYISLVETRREYFEGPGQGSPFGWNGDL |
| | | KKWYEMLMGHCTYFPQELRSVKYAYSADLFNALNDLNNLIIQRDNSEKLEYHEKY |
| | | HIIENVFKQKKKPTLKQIAKEIGVNPEDIKGYRITKSGTPEFTSFKLFHDLKKVVKDH |
| | | AILDDIDLLNQIAEILTIYQDKDSIVAELGQLEYLMSEADKQSISELTGYTGTHSLSLK |
| | | CMNMIIDELWHSSMNQMEVFTYLNMRPKKYELKGYQRIPTDMIDDAILSPVVKRTF |
| | | IQSINVINKVIEKYGIPEDIIIELARENNSDDRKKFINNLQKKNEATRKRINEIIGQTGN |
| | | QNAKRIVEKIRLHDQQEGKCLYSLESIPLEDLLNNPNHYEVDHIIPRSVSFDNSYHNK |
| | | VLVKQSENSKKSNLTPYQYFNSGKSKLSYNQFKQHILNLSKSQDRISKKKKEYLLEE |
| | | RDINKFEVQKEFINRNLVDTRYATRELTNYLKAYFSANNMNVKVKTINGSFTDYLR |
| | | KVWKFKKERNHGYKHHAEDALIIANADFLFKENKKLKAVNSVLEKPEIETKQLDIQ |
| | | VDSEDNYSEMFIIPKQVQDIKDFRNFKYSHRVDKKPNRQLINDTLYSTRKKDNSTYI |
| | | VQTIKDIYAKDNTTLKKQFDKSPEKFLMYQHDPRTFEKLEVIMKQYANEKNPLAKY |
| | | HEETGEYLTKYSKKNNGPIVKSLKYIGNKLGSHLDVTHQFKSSTKKLVKLSIKNYRF |
| | | DVYLTEKGYKFVTIAYLNVFKKDNYYYIPKDKYQELKEKKKIKDTDQFIASFYKND |
| | | LIKLNGDLYKIIGVNSDDRNIIELDYYDIKYKDYCEINNIKGEPRIKKTIGKKTESIEKF |
| | | TTDVLGNLYLHSTEKAPQLIFKRGL |
| 7585 | SRGN3.1 | MNQKFILGLDIGITSVGYGLIDYETKNIIDAGVRLFPEANVENNEGRRSKRGSRRLKR |
| | (N585A) | RRIHRLERVKLLLTEYDLINKEQIPTSNNPYQIRVKGLSEILSKDELAIALLHLAKRRG |
| | Nickase | IHNVDVAADKEETASDSLSTKDQINKNAKFLESRYVCELQKERLENEGHVRGVENR |
| | | FLTKDIVREAKKIIDTQMQYYPEIDETFKEKYISLVETRREYFEGPGQGSPFGWNGDL |
| | | KKWYEMLMGHCTYFPQELRSVKYAYSADLFNALNDLNNLIIQRDNSEKLEYHEKY |
| | | HIIENVFKQKKKPTLKQIAKEIGVNPEDIKGYRITKSGTPEFTSFKLFHDLKKVVKDH |
| | | AILDDIDLLNQIAEILTIYQDKDSIVAELGQLEYLMSEADKQSISELTGYTGTHSLSLK |
| | | CMNMIIDELWHSSMNQMEVFTYLNMRPKKYELKGYQRIPTDMIDDAILSPVVKRTF |
| | | IQSINVINKVIEKYGIPEDIIIELARENNSDDRKKFINNLQKKNEATRKRINEIIGQTGN |
| | | QNAKRIVEKIRLHDQQEGKCLYSLESIPLEDLLNNPNHYEVDHIIPRSVSFDNSYHNK |
| | | VLVKQSEASKKSNLTPYQYFNSGKSKLSYNQFKQHILNLSKSQDRISKKKKEYLLEE |
| | | RDINKFEVQKEFINRNLVDTRYATRELTNYLKAYFSANNMNVKVKTINGSFTDYLR |
| | | KVWKFKKERNHGYKHHAEDALIIANADFLFKENKKLKAVNSVLEKPEIETKQLDIQ |
| | | VDSEDNYSEMFIIPKQVQDIKDFRNFKYSHRVDKKPNRQLINDTLYSTRKKDNSTYI |
| | | VQTIKDIYAKDNTTLKKQFDKSPEKFLMYQHDPRTFEKLEVIMKQYANEKNPLAKY |
| | | HEETGEYLTKYSKKNNGPIVKSLKYIGNKLGSHLDVTHQFKSSTKKLVKLSIKNYRF |
| | | DVYLTEKGYKFVTIAYLNVFKKDNYYYIPKDKYQELKEKKKIKDTDQFIASFYKND |
| | | LIKLNGDLYKIIGVNSDDRNIIELDYYDIKYKDYCEINNIKGEPRIKKTIGKKTESIEKF |
| | | TTDVLGNLYLHSTEKAPQLIFKRGL |
| 7586 | Met (−) | NQKFILGLDIGITSVGYGLIDYETKNIIDAGVRLFPEANVENNEGRRSKRGSRRLKRR |
| | sRGN3.1 | RIHRLERVKLLLTEYDLINKEQIPTSNNPYQIRVKGLSEILSKDELAIALLHLAKRRGI |
| | (N584A) | HNVDVAADKEETASDSLSTKDQINKNAKFLESRYVCELQKERLENEGHVRGVENRF |
| | Nickase | LTKDIVREAKKIIDTQMQYYPEIDETFKEKYISLVETRREYFEGPGQGSPFGWNGDLK |
| | | KWYEMLMGHCTYFPQELRSVKYAYSADLFNALNDLNNLIIQRDNSEKLEYHEKYHI |
| | | IENVFKQKKKPTLKQIAKEIGVNPEDIKGYRITKSGTPEFTSFKLFHDLKKVVKDHAI |
| | | LDDIDLLNQIAEILTIYQDKDSIVAELGQLEYLMSEADKQSISELTGYTGTHSLSLKC |
| | | MNMIIDELWHSSMNQMEVFTYLNMRPKKYELKGYQRIPTDMIDDAILSPVVKRTFI |
| | | QSINVINKVIEKYGIPEDIIIELARENNSDDRKKFINNLQKKNEATRKRINEIIGQTGNQ |
| | | NAKRIVEKIRLHDQQEGKCLYSLESIPLEDLLNNPNHYEVDHIIPRSVSFDNSYHNKV |
| | | LVKQSEASKKSNLTPYQYFNSGKSKLSYNQFKQHILNLSKSQDRISKKKKEYLLEER |
| | | DINKFEVQKEFINRNLVDTRYATRELTNYLKAYFSANNMNVKVKTINGSFTDYLRK |
| | | VWKFKKERNHGYKHHAEDALIIANADFLFKENKKLKAVNSVLEKPEIETKQLDIQV |
| | | DSEDNYSEMFIIPKQVQDIKDFRNFKYSHRVDKKPNRQLINDTLYSTRKKDNSTYIV |
| | | QTIKDIYAKDNTTLKKQFDKSPEKFLMYQHDPRTFEKLEVIMKQYANEKNPLAKYH |
| | | EETGEYLTKYSKKNNGPIVKSLKYIGNKLGSHLDVTHQFKSSTKKLVKLSIKNYRFD |
| | | VYLTEKGYKFVTIAYLNVFKKDNYYYIPKDKYQELKEKKKIKDTDQFIASFYKNDLI |
| | | KLNGDLYKIIGVNSDDRNIIELDYYDIKYKDYCEINNIKGEPRIKKTIGKKTESIEKFTT |
| | | DVLGNLYLHSTEKAPQLIFKRGL |
| 7587 | sRGN3.3 | MNQKFILGLDIGITSVGYGLIDYETKNIIDAGVRLFPEANVENNEGRRSKRGSRRLKR |
| | | RRIHRLERVKLLLTEYDLINKEQIPTSNNPYQIRVKGLSEILSKDELAIALLHLAKRRG |
| | | IHNVDVAADKEETASDSLSTKDQINKNAKFLESRYVCELQKERLENEGHVRGVENR |
| | | FLTKDIVREAKKIIDTQMQYYPEIDETFKEKYISLVETRREYFEGPGQGSPFGWNGDL |
| | | KKWYEMLMGHCTYFPQELRSVKYAYSADLFNALNDLNNLIIQRDNSEKLEYHEKY |
| | | HIIENVFKQKKKPTLKQIAKEIGVNPEDIKGYRITKSGTPEFTSFKLFHDLKKVVKDH |
| | | AILDDIDLLNQIAEILTIYQDKDSIVAELGQLEYLMSEADKQSISELTGYTGTHSLSLK |
| | | CMNMIIDELWHSSMNQMEVFTYLNMRPKKYELKGYQRIPTDMIDDAILSPVVKRTF |
| | | IQSINVINKVIEKYGIPEDIIIELARENNSDDRKKFINNLQKKNEATRKRINEIIGQTGN |
| | | QNAKRIVEKIRLHDQQEGKCLYSLESIPLEDLLNNPNHYEVDHIIPRSVSFDNSYHNK |
| | | VLVKQSENSKKSNLTPYQYFNSGKSKLSYNQFKQHILNLSKSQDRISKKKKEYLLEE |
| | | RDINKFEVQKEFINRNLVDTRYATRELTSYLKAYFSANNMDVKVKTINGSFTNHLR |
| | | KVWRFDKYRNHGYKHHAEDALIIANADFLFKENKKLQNTNKILEKPTIENNTKKVT |
| | | VEKEEDYNNVFETPKLVEDIKQYRDYKFSHRVDKKPNRQLINDTLYSTRMKDEHDY |
| | | IVQTITDIYGKDNTNLKKQFNKNPEKFLMYQNDPKTFEKLSIIMKQYSDEKNPLAKY |
| | | YEETGEYLTKYSKKNNGPIVKKIKLLGNKVGNHLDVTNKYENSTKKLVKLSIKNYR |
| | | FDVYLTEKGYKFVTIAYLNVFKKDNYYYIPKDKYQELKEKKKIKDTDQFIASFYKN |
| | | DLIKLNGDLYKIIGVNSDDRNIIELDYYDIKYKDYCEINNIKGEPRIKKTIGKKTESIEK |
| | | FTTDVLGNLYLHSTEKAPQLIFKRGL |
| 7588 | sRGN3.3 | MNQKFILGLDIGITSVGYGLIDYETKNIIDAGVRLFPEANVENNEGRRSKRGSRRLKR |
| | (N585A) | RRIHRLERVKLLLTEYDLINKEQIPTSNNPYQIRVKGLSEILSKDELAIALLHLAKRRG |
| | Nickase | IHNVDVAADKEETASDSLSTKDQINKNAKFLESRYVCELQKERLENEGHVRGVENR |
| | | FLTKDIVREAKKIIDTQMQYYPEIDETFKEKYISLVETRREYFEGPGQGSPFGWNGDL |
| | | KKWYEMLMGHCTYFPQELRSVKYAYSADLFNALNDLNNLIIQRDNSEKLEYHEKY |
| | | HIIENVFKQKKKPTLKQIAKEIGVNPEDIKGYRITKSGTPEFTSFKLFHDLKKVVKDH |
| | | AILDDIDLLNQIAEILTIYQDKDSIVAELGQLEYLMSEADKQSISELTGYTGTHSLSLK |
| | | CMNMIIDELWHSSMNQMEVFTYLNMRPKKYELKGYQRIPTDMIDDAILSPVVKRTF |
| | | IQSINVINKVIEKYGIPEDIIIELARENNSDDRKKFINNLQKKNEATRKRINEIIGQTGN |
| | | QNAKRIVEKIRLHDQQEGKCLYSLESIPLEDLLNNPNHYEVDHIIPRSVSFDNSYHNK |
| | | VLVKQSEASKKSNLTPYQYFNSGKSKLSYNQFKQHILNLSKSQDRISKKKKEYLLEE |
| | | RDINKFEVQKEFINRNLVDTRYATRELTSYLKAYFSANNMDVKVKTINGSFTNHLR |
| | | KVWRFDKYRNHGYKHHAEDALIIANADFLFKENKKLQNTNKILEKPTIENNTKKVT |
| | | VEKEEDYNNVFETPKLVEDIKQYRDYKFSHRVDKKPNRQLINDTLYSTRMKDEHDY |
| | | IVQTITDIYGKDNTNLKKQFNKNPEKFLMYQNDPKTFEKLSIIMKQYSDEKNPLAKY |
| | | YEETGEYLTKYSKKNNGPIVKKIKLLGNKVGNHLDVTNKYENSTKKLVKLSIKNYR |
| | | FDVYLTEKGYKFVTIAYLNVFKKDNYYYIPKDKYQELKEKKKIKDTDQFIASFYKN |
| | | DLIKLNGDLYKIIGVNSDDRNIIELDYYDIKYKDYCEINNIKGEPRIKKTIGKKTESIEK |
| | | FTTDVLGNLYLHSTEKAPQLIFKRGL |
| 7589 | Met (−) | NQKFILGLDIGITSVGYGLIDYETKNIIDAGVRLFPEANVENNEGRRSKRGSRRLKRR |
| | sRGN3.3 | RIHRLERVKLLLTEYDLINKEQIPTSNNPYQIRVKGLSEILSKDELAIALLHLAKRRGI |
| | (N584A) | HNVDVAADKEETASDSLSTKDQINKNAKFLESRYVCELQKERLENEGHVRGVENRF |
| | Nickase | LTKDIVREAKKIIDTQMQYYPEIDETFKEKYISLVETRREYFEGPGQGSPFGWNGDLK |
| | | KWYEMLMGHCTYFPQELRSVKYAYSADLFNALNDLNNLIIQRDNSEKLEYHEKYHI |
| | | IENVFKQKKKPTLKQIAKEIGVNPEDIKGYRITKSGTPEFTSFKLFHDLKKVVKDHAI |
| | | LDDIDLLNQIAEILTIYQDKDSIVAELGQLEYLMSEADKQSISELTGYTGTHSLSLKC |
| | | MNMIIDELWHSSMNQMEVFTYLNMRPKKYELKGYQRIPTDMIDDAILSPVVKRTFI |
| | | QSINVINKVIEKYGIPEDIIIELARENNSDDRKKFINNLQKKNEATRKRINEIIGQTGNQ |
| | | NAKRIVEKIRLHDQQEGKCLYSLESIPLEDLLNNPNHYEVDHIIPRSVSFDNSYHNKV |
| | | LVKQSEASKKSNLTPYQYFNSGKSKLSYNQFKQHILNLSKSQDRISKKKKEYLLEER |
| | | DINKFEVQKEFINRNLVDTRYATRELTSYLKAYFSANNMDVKVKTINGSFTNHLRK |
| | | VWRFDKYRNHGYKHHAEDALIIANADFLFKENKKLQNTNKILEKPTIENNTKKVTV |
| | | EKEEDYNNVFETPKLVEDIKQYRDYKFSHRVDKKPNRQLINDTLYSTRMKDEHDYI |
| | | VQTITDIYGKDNTNLKKQFNKNPEKFLMYQNDPKTFEKLSIIMKQYSDEKNPLAKY |
| | | YEETGEYLTKYSKKNNGPIVKKIKLLGNKVGNHLDVTNKYENSTKKLVKLSIKNYR |
| | | FDVYLTEKGYKFVTIAYLNVFKKDNYYYIPKDKYQELKEKKKIKDTDQFIASFYKN |
| | | DLIKLNGDLYKIIGVNSDDRNIIELDYYDIKYKDYCEINNIKGEPRIKKTIGKKTESIEK |
| | | FTTDVLGNLYLHSTEKAPQLIFKRGL |
| 7590 | SpG | MDKKYSIGLDIGTNSVGWAVITDEYKVPSKKFKVLGNTDRHSIKKNLIGALLFDSGE |
| | | TAEATRLKRTARRRYTRRKNRICYLQEIFSNEMAKVDDSFFHRLEESFLVEEDKKHE |
| | | RHPIFGNIVDEVAYHEKYPTIYHLRKKLVDSTDKADLRLIYLALAHMIKFRGHFLIEG |
| | | DLNPDNSDVDKLFIQLVQTYNQLFEENPINASGVDAKAILSARLSKSRRLENLIAQLP |
| | | GEKKNGLFGNLIALSLGLTPNFKSNFDLAEDAKLQLSKDTYDDDLDNLLAQIGDQY |
| | | ADLFLAAKNLSDAILLSDILRVNTEITKAPLSASMIKRYDEHHQDLTLLKALVRQQLP |
| | | EKYKEIFFDQSKNGYAGYIDGGASQEEFYKFIKPILEKMDGTEELLVKLNREDLLRK |
| | | QRTFDNGSIPHQIHLGELHAILRRQEDFYPFLKDNREKIEKILTFRIPYYVGPLARGNS |
| | | RFAWMTRKSEETITPWNFEEVVDKGASAQSFIERMTNFDKNLPNEKVLPKHSLLYE |
| | | YFTVYNELTKVKYVTEGMRKPAFLSGEQKKAIVDLLFKTNRKVTVKQLKEDYFKKI |
| | | ECFDSVEISGVEDRFNASLGTYHDLLKIIKDKDFLDNEENEDILEDIVLTLTLFEDREM |
| | | IEERLKTYAHLFDDKVMKQLKRRRYTGWGRLSRKLINGIRDKQSGKTILDFLKSDGF |
| | | ANRNFMQLIHDDSLTFKEDIQKAQVSGQGDSLHEHIANLAGSPAIKKGILQTVKVVD |
| | | ELVKVMGRHKPENIVIEMARENQTTQKGQKNSRERMKRIEEGIKELGSQILKEHPVE |
| | | NTQLQNEKLYLYYLQNGRDMYVDQELDINRLSDYDVDHIVPQSFLKDDSIDNKVLT |
| | | RSDKNRGKSDNVPSEEVVKKMKNYWRQLLNAKLITQRKFDNLTKAERGGLSELDK |
| | | AGFIKRQLVETRQITKHVAQILDSRMNTKYDENDKLIREVKVITLKSKLVSDFRKDF |
| | | QFYKVREINNYHHAHDAYLNAVVGTALIKKYPKLESEFVYGDYKVYDVRKMIAKS |
| | | EQEIGKATAKYFFYSNIMNFFKTEITLANGEIRKRPLIETNGETGEIVWDKGRDFATV |
| | | RKVLSMPQVNIVKKTEVQTGGFSKESILPKRNSDKLIARKKDWDPKKYGGFLWPTV |
| | | AYSVLVVAKVEKGKSKKLKSVKELLGITIMERSSFEKNPIDFLEAKGYKEVKKDLIIK |
| | | LPKYSLFELENGRKRMLASAKQLQKGNELALPSKYVNFLYLASHYEKLKGSPEDNE |
| | | QKQLFVEQHKHYLDEIIEQISEFSKRVILADANLDKVLSAYNKHRDKPIREQAENIIH |
| | | LFTLTNLGAPAAFKYFDTTIDRKQYRSTKEVLDATLIHQSITGLYETRIDLSQLGGD |
| 7591 | SpG(H840A) | MDKKYSIGLDIGTNSVGWAVITDEYKVPSKKFKVLGNTDRHSIKKNLIGALLFDSGE |
| | Nickase | TAEATRLKRTARRRYTRRKNRICYLQEIFSNEMAKVDDSFFHRLEESFLVEEDKKHE |
| | | RHPIFGNIVDEVAYHEKYPTIYHLRKKLVDSTDKADLRLIYLALAHMIKFRGHFLIEG |
| | | DLNPDNSDVDKLFIQLVQTYNQLFEENPINASGVDAKAILSARLSKSRRLENLIAQLP |
| | | GEKKNGLFGNLIALSLGLTPNFKSNFDLAEDAKLQLSKDTYDDDLDNLLAQIGDQY |
| | | ADLFLAAKNLSDAILLSDILRVNTEITKAPLSASMIKRYDEHHQDLTLLKALVRQQLP |
| | | EKYKEIFFDQSKNGYAGYIDGGASQEEFYKFIKPILEKMDGTEELLVKLNREDLLRK |
| | | QRTFDNGSIPHQIHLGELHAILRRQEDFYPFLKDNREKIEKILTFRIPYYVGPLARGNS |
| | | RFAWMTRKSEETITPWNFEEVVDKGASAQSFIERMTNFDKNLPNEKVLPKHSLLYE |
| | | YFTVYNELTKVKYVTEGMRKPAFLSGEQKKAIVDLLFKTNRKVTVKQLKEDYFKKI |
| | | ECFDSVEISGVEDRFNASLGTYHDLLKIIKDKDFLDNEENEDILEDIVLTLTLFEDREM |
| | | IEERLKTYAHLFDDKVMKQLKRRRYTGWGRLSRKLINGIRDKQSGKTILDFLKSDGF |
| | | ANRNFMQLIHDDSLTFKEDIQKAQVSGQGDSLHEHIANLAGSPAIKKGILQTVKVVD |
| | | ELVKVMGRHKPENIVIEMARENQTTQKGQKNSRERMKRIEEGIKELGSQILKEHPVE |
| | | NTQLQNEKLYLYYLQNGRDMYVDQELDINRLSDYDVDAIVPQSFLKDDSIDNKVLT |
| | | RSDKNRGKSDNVPSEEVVKKMKNYWRQLLNAKLITQRKFDNLTKAERGGLSELDK |
| | | AGFIKRQLVETRQITKHVAQILDSRMNTKYDENDKLIREVKVITLKSKLVSDFRKDF |
| | | QFYKVREINNYHHAHDAYLNAVVGTALIKKYPKLESEFVYGDYKVYDVRKMIAKS |
| | | EQEIGKATAKYFFYSNIMNFFKTEITLANGEIRKRPLIETNGETGEIVWDKGRDFATV |
| | | RKVLSMPQVNIVKKTEVQTGGFSKESILPKRNSDKLIARKKDWDPKKYGGFLWPTV |
| | | AYSVLVVAKVEKGKSKKLKSVKELLGITIMERSSFEKNPIDFLEAKGYKEVKKDLIIK |
| | | LPKYSLFELENGRKRMLASAKQLQKGNELALPSKYVNFLYLASHYEKLKGSPEDNE |
| | | QKQLFVEQHKHYLDEIIEQISEFSKRVILADANLDKVLSAYNKHRDKPIREQAENIIH |
| | | LFTLTNLGAPAAFKYFDTTIDRKQYRSTKEVLDATLIHQSITGLYETRIDLSQLGGD |
| 7592 | Met (−) | DKKYSIGLDIGTNSVGWAVITDEYKVPSKKFKVLGNTDRHSIKKNLIGALLFDSGET |
| | SpG(H839A) | AEATRLKRTARRRYTRRKNRICYLQEIFSNEMAKVDDSFFHRLEESFLVEEDKKHER |
| | Nickase | HPIFGNIVDEVAYHEKYPTIYHLRKKLVDSTDKADLRLIYLALAHMIKFRGHFLIEGD |
| | | LNPDNSDVDKLFIQLVQTYNQLFEENPINASGVDAKAILSARLSKSRRLENLIAQLPG |
| | | EKKNGLFGNLIALSLGLTPNFKSNFDLAEDAKLQLSKDTYDDDLDNLLAQIGDQYA |
| | | DLFLAAKNLSDAILLSDILRVNTEITKAPLSASMIKRYDEHHQDLTLLKALVRQQLPE |
| | | KYKEIFFDQSKNGYAGYIDGGASQEEFYKFIKPILEKMDGTEELLVKLNREDLLRKQ |
| | | RTFDNGSIPHQIHLGELHAILRRQEDFYPFLKDNREKIEKILTFRIPYYVGPLARGNSR |
| | | FAWMTRKSEETITPWNFEEVVDKGASAQSFIERMTNFDKNLPNEKVLPKHSLLYEY |
| | | FTVYNELTKVKYVTEGMRKPAFLSGEQKKAIVDLLFKTNRKVTVKQLKEDYFKKIE |
| | | CFDSVEISGVEDRFNASLGTYHDLLKIIKDKDFLDNEENEDILEDIVLTLTLFEDREMI |
| | | EERLKTYAHLFDDKVMKQLKRRRYTGWGRLSRKLINGIRDKQSGKTILDFLKSDGF |
| | | ANRNFMQLIHDDSLTFKEDIQKAQVSGQGDSLHEHIANLAGSPAIKKGILQTVKVVD |
| | | ELVKVMGRHKPENIVIEMARENQTTQKGQKNSRERMKRIEEGIKELGSQILKEHPVE |
| | | NTQLQNEKLYLYYLQNGRDMYVDQELDINRLSDYDVDAIVPQSFLKDDSIDNKVLT |
| | | RSDKNRGKSDNVPSEEVVKKMKNYWRQLLNAKLITQRKFDNLTKAERGGLSELDK |
| | | AGFIKRQLVETRQITKHVAQILDSRMNTKYDENDKLIREVKVITLKSKLVSDFRKDF |
| | | QFYKVREINNYHHAHDAYLNAVVGTALIKKYPKLESEFVYGDYKVYDVRKMIAKS |
| | | EQEIGKATAKYFFYSNIMNFFKTEITLANGEIRKRPLIETNGETGEIVWDKGRDFATV |
| | | RKVLSMPQVNIVKKTEVQTGGFSKESILPKRNSDKLIARKKDWDPKKYGGFLWPTV |
| | | AYSVLVVAKVEKGKSKKLKSVKELLGITIMERSSFEKNPIDFLEAKGYKEVKKDLIIK |
| | | LPKYSLFELENGRKRMLASAKQLQKGNELALPSKYVNFLYLASHYEKLKGSPEDNE |
| | | QKQLFVEQHKHYLDEIIEQISEFSKRVILADANLDKVLSAYNKHRDKPIREQAENIIH |
| | | LFTLTNLGAPAAFKYFDTTIDRKQYRSTKEVLDATLIHQSITGLYETRIDLSQLGGD |

[0123] In some embodiments, a Cas9 protein comprises a variant Cas9 protein containing one or more amino acid substitutions. In some embodiments, a wildtype Cas9 protein comprises a RuvC domain and an HNH domain. In some embodiments, a prime editor comprises a nuclease active Cas9 protein that may cleave both strands of a double stranded target DNA sequence. In some embodiments, the nuclease active Cas9 protein comprises a functional RuvC domain and a functional HNH domain. In some embodiments, a prime editor comprises a Cas9 nickase that can bind to a guide polynucleotide and recognize a target DNA, but can cleave only one strand of a double stranded target DNA. In some embodiments, the Cas9 nickase comprises only one functional RuvC domain or one functional HNH domain. In some embodiments, a prime editor comprises a Cas9 that has a non-functional HNH domain and a functional RuvC domain. In some embodiments, the prime editor can cleave the edit strand (i.e., the PAM strand), but not the non-edit strand of a double stranded target DNA sequence. In some embodiments, a prime editor comprises a Cas9 having a non-functional RuvC domain that can cleave the target strand (i.e., the non-PAM strand), but not the edit strand of a double stranded target DNA sequence. In some embodiments, a prime editor comprises a Cas9 that has neither a functional RuvC domain nor a functional HNH domain, which may not cleave any strand of a double stranded target DNA sequence.

[0124] In some embodiments, a prime editor comprises a Cas9 having a mutation in the RuvC domain that reduces or abolishes the nuclease activity of the RuvC domain. In some embodiments, the Cas9 comprises a mutation at amino acid D10 as compared to a wild type SpCas9 as set forth in SEQ ID NO: 7567, or a corresponding mutation thereof. In some embodiments, the Cas9 comprises a D10A mutation as compared to a wild type SpCas9 as set forth in SEQ ID NO: 7567, or a corresponding mutation thereof. In some embodiments, the Cas9 polypeptide comprises a mutation at amino acid D10, G12, and/or G17 as compared to a wild type SpCas9 as set forth in SEQ ID NO: 7567, or a corresponding mutation thereof. In some embodiments, the Cas9 polypeptide comprises a D10A mutation, a G12A mutation, and/or a G17A mutation as compared to a wild type SpCas9 as set forth in SEQ ID NO: 7567, or a corresponding mutation thereof.

[0125] In some embodiments, a prime editor comprises a Cas9 polypeptide having a mutation in the HNH domain that reduces or abolishes the nuclease activity of the HNH domain. In some embodiments, the Cas9 polypeptide comprises a mutation at amino acid H840 as compared to a wild type SpCas9 as set forth in SEQ ID NO: 7567, or a corresponding mutation thereof. In some embodiments, the Cas9 polypeptide comprises a H840A mutation as compared to a wild type SpCas9 as set forth in SEQ ID NO: 7567, or a corresponding mutation thereof. In some embodiments, the Cas9 polypeptide comprises a mutation at amino acid E762, D839, H840, N854, N856, N863, H982, H983, A984, D986, and/or a A987 as compared to a wild type SpCas9 as set forth in SEQ ID NO: 7567, or a corresponding mutation thereof. In some embodiments, the Cas9 polypeptide comprises a E762A, D839A, H840A, N854A, N856A, N863A, H982A, H983A, A984A, and/or a D986A mutation as compared to a wild type SpCas9 as set forth in SEQ ID NO: 7567, or a corresponding mutation thereof. In some embodiments, the Cas9 polypeptide comprises a mutation at amino acid residue R221, N394, and/or H840 as compared to a wild type SpCas9 (e.g., SEQ ID NO: 7567). In some embodiments, the Cas9 polypeptide comprises a R221K, N394L, and/or H840A mutation as compared to a wild type SpCas9 as set forth in SEQ ID NO: 7567, or a corresponding mutation thereof. In some embodiments, the Cas9 polypeptide comprises a mutation at amino acid residue R220, N393, and/or H839 as compared to a wild type SpCas9 (e.g., SEQ ID NO: 7567) lacking a N-terminal methionine, or a corresponding mutation thereof. In some embodiments, the Cas9 polypeptide comprises a R220K, N393K, and/or H839A mutation as compared to a wild type SpCas9 (as set forth in SEQ ID NO: 7567, lacking a N-terminal methionine, or a corresponding mutation thereof.

[0126] In some embodiments, a prime editor comprises a Cas9 having one or more amino acid substitutions in both the HNH domain and the RuvC domain that reduce or abolish the nuclease activity of both the HNH domain and the RuvC domain. In some embodiments, the prime editor comprises a nuclease inactive Cas9, or a nuclease dead Cas9 (dCas9). In some embodiments, the dCas9 comprises a H840X substitution and a D10X mutation compared to a wild type SpCas9 as set forth in SEQ ID NO: 7567 or corresponding mutations thereof, wherein X is any amino acid other than H for the H840X substitution and any amino acid other than D for the D10X substitution. In some embodiments, the dead Cas9 comprises a H840A and a D10A mutation as compared to a wild type SpCas9 as set forth in SEQ ID NO: 7567, or corresponding mutations thereof.

[0127] In some embodiments, the N-terminal methionine is removed from the amino acid sequence of a Cas9 nickase, or from any Cas9 variant, ortholog, or equivalent disclosed or contemplated herein. For example, methionine-minus (Met (-)) Cas9 nickases include any one of the sequences set forth in SEQ ID NOs: 7568, 7571, 7574, 7577, 7580, 7583, 7586, 7589, 7592 or a variant thereof having an amino acid sequence that has at least 80%, at least 85%, at least 90%, at least 95%, or at least 99% sequence identity thereto.

[0128] Besides dead Cas9 and Cas9 nickase variants, the Cas9 proteins used herein may also include other Cas9 variants having at least about 70%, at least about 80%, at least about 90%, at least about 95%, at least about 96%, at least about 97%, at least about 98%, at least about 99%, at least about 99.5%, or at least about 99.9% sequence identity to any reference Cas9 protein, including any wild type Cas9, or mutant Cas9 (e.g., a dead Cas9 or Cas9 nickase), or fragment Cas9, or circular permutant Cas9, or other variant of Cas9 disclosed herein or known in the art. In some embodiments, a Cas9 variant may have 1, 2, 3, 4, 5, 6, 7, 8, 9, 10, 11, 12, 13, 14, 15, 16, 17, 18, 19, 20, 21, 22, 21, 24, 25, 26, 27, 28, 29, 30, 31, 32, 33, 34, 35, 36, 37, 38, 39, 40, 41, 42, 43, 44, 45, 46, 47, 48, 49, 50 or more amino acid changes compared to a reference Cas9, e.g., a wild type Cas9. In some embodiments, the Cas9 variant comprises a fragment of a reference Cas9 (e.g., a gRNA binding domain or a DNA-cleavage domain), such that the fragment is at least about 70% identical, at least about 80% identical, at least about 90% identical, at least about 95% identical, at least about 96% identical, at least about 97% identical, at least about 98% identical, at least about 99% identical, at least about 99.5% identical, or at least about 99.9% identical to the corresponding fragment of a reference Cas9, e.g., a wild type Cas9. In some embodiments, the fragment is at least 30%, at least 35%, at least 40%, at least 45%, at least 50%, at least 55%, at least 60%, at least 65%, at least 70%, at least 75%, at least 80%, at least 85%, at least 90%, at least 95%, at least 96%, at least 97%, at least 98%, at least 99%, or at least 99.5% of the amino acid length of a corresponding wild type Cas9.

[0129] In some embodiments, a Cas9 fragment is a functional fragment that retains one or more Cas9 activities. In some embodiments, the Cas9 fragment is at least 100 amino acids in length. In some embodiments, the fragment is at least 100, 150, 200, 250, 300, 350, 400, 450, 500, 550, 600, 650, 700, 750, 800, 850, 900, 950, 1000, 1050, 1100, 1150, 1200, 1250, or at least 1300 amino acids in length.

[0130] In some embodiments, a prime editor comprises a Cas protein, e.g., Cas9, containing modifications that allow altered PAM recognition. In prime editing using a Cas-protein-based prime editor, a “protospacer adjacent motif (PAM)”, PAM sequence, or PAM-like motif, may be used to refer to a short DNA sequence immediately following the protospacer sequence on the PAM strand of the target gene. In some embodiments, the PAM is recognized by the Cas nuclease in the prime editor during prime editing. In certain embodiments, the PAM is required for target binding of the Cas protein. The specific PAM sequence required for Cas protein recognition may depend on the specific type of the Cas protein. A PAM can be 1, 2, 3, 4, 5, 6, 7, 8, 9, 10 or more nucleotides in length. In some embodiments, a PAM is between 2-6 nucleotides in length. In some embodiments, the PAM can be a 5′ PAM (i.e., located upstream of the 5′ end of the protospacer). In other embodiments, the PAM can be a 3′ PAM (i.e., located downstream of the 5′ end of the protospacer). In some embodiments, the Cas protein of a prime editor recognizes a canonical PAM, for example, a SpCas9 recognizes 5′-NGG-3′ PAM. In some embodiments, the Cas protein of a prime editor has altered or non-canonical PAM specificities. Exemplary PAM sequences and corresponding Cas variants are described in Table 49 below. It should be appreciated that for each of the variants provided, the Cas protein comprises one or more of the amino acid substitutions as indicated compared to a wild type Cas protein sequence, for example, the Cas9 as set forth in SEQ ID NO: 7567. The PAM motifs as shown in Table 49 below are in the order of 5′ to 3′. In some embodiments, the Cas proteins of the disclosure can also be used to direct transcriptional control of target sequences, for example silencing transcription by sequence-specific binding to target sequences. In some embodiments, a Cas protein described herein may have one or mutations in a PAM recognition motif. In some embodiments, a Cas protein described herein may have altered PAM specificity.

[0131] As used in PAM sequences in Table 49, “N” refers to any one of nucleotides A, G, C, and T, “R” refers to nucleotide A or G, and “Y”, refers to nucleotide C or T.

TABLE 49
Cas protein variants and corresponding PAM sequences

| Variant | PAM |
|---|---|
| spCas9 (wild type) | NGG, NGA, NAG, NGNGA |
| spCas9-VRVRFRR | NG |
| R1335V/L1111R/D1135V/G1218R/ | |
| E1219F/A1322R/T1337R | |
| spCas9-VQR (D1135V/R1335Q/ | NGA |
| T1337R) | |
| spCas9-EQR | NGA |
| (D1135E/R1335Q/T1337R) | |
| spCas9-VRER | NGCG |
| (D1135V/G1218R/R1335E/T1337R) | |
| spCas9-VRQR | NGA |
| (D1135V, G1218R, R1335Q, T1337R) | |
| Cas9-NG | NGN |
| (L1111R, D1135V, G1218R, E1219F, | |
| A1322R, T1337R, R1335V) | |
| SpG Cas9 | NGN |
| (D1135L, S1136W, G1218K, E1219Q, | |
| R1335Q, T1337R) | |
| SyRY Cas9 | NRN |
| (A61R, L1111R, N1317R, A1322R, | |
| and R1333P) | |
| xCas9 (E480K, E543D, E1219V, | NGN |
| K294R, Q1256K, A262T, S409I, M694I) | |
| SluCa9 | NNGG |
| sRGN1, sRGN2, sRGN4, sRGN3.1, | NNGG |
| sRGN3.3 | |
| saCas9 | NNGRRT, NNGRRN |
| saCas9-KKH | NNNRRT |
| (E782K, N968K, R1015H) | |
| spCas9-MQKSER | NGCG/NGCN |
| (D1135M, S1136Q, G1218K, E1219S, | |
| R1335E, T1337R) | |
| spCas9-LRKIQK | NGTN |
| (D1135L, S1136R, G1218K, E1219I, | |
| R1335Q, T1337K) | |
| spCas9-LRVSQK | NGTN |
| (D1135L, S1136R, G1218V, E1219S, | |
| R1335Q, T1337K) | |
| spCas9-LRVSQL | NGTN |
| (D1135L, S1136R, G12118V, E1219S, | |
| R1335Q, T1337L) | |
| Cpf1 | TTTV |
| Spy-Mac | NAA |
| NmCas9 | NNNNGATT |
| StCas9 | NNAGAAW |
| TdCas9 | NAAAAC |

[0132] In some embodiments, a prime editor comprises a Cas9 polypeptide comprising one or mutations selected from the group consisting of: A6iR, LiiiR, Di1i35V, R22iK, A262T, R324L, N394K, S4091, S4091, E427G, E480K, M495V, N497A, Y5i5N, K526E, F539S, E543D, R654L, R66iA, R66iL, R69iA, N692A, M694A, M6941, Q695A, H698A, R753G, M7631, K848A, K890N, Q926A, Ki003A, RiO60A, LiiiiR, Riii4G, Dii35E, Dii35L, Dii35N, Sii36W, Vii39A, Dii80G, Gi2i8K, G1218R, G1218S, E1219Q, E1219V, E1219V, Q1221H, P1249S, E1253K, N1317R, A1320V, P1321S, A1322R, 11322V, D1332G, R1332N, A1332R, R1333K, R1333P, R1335L, R1335Q, R1335V, T1337N, T1337R, S1338T, H1349R, and any combinations thereof as compared to a wildtype SpCas9 polypeptide as set forth in SEQ ID NO: 7567.

[0133] In some embodiments, a prime editor comprises a SaCas9 polypeptide. In some embodiments, the SaCas9 polypeptide comprises one or more of mutations E782K, N968K, and RiO15H as compared to a wild type SaCas9. In some embodiments, a prime editor comprises a FnCas9 polypeptide, for example, a wildtype FnCas9 polypeptide or a FnCas9 polypeptide comprising one or more of mutations E1369R, E1449H, or R1556A as compared to the wild type FnCas9. In some embodiments, a prime editor comprises a Sc Cas9, for example, a wild type ScCas9 or a ScCas9 polypeptide comprises one or more of mutations I367K, G368D, I369K, H371L, T375S, T376G, and T1227K as compared to the wild type ScCas9. In some embodiments, a prime editor comprises a St1 Cas9 polypeptide, a St3 Cas9 polypeptide, or a SluCas9 polypeptide.

[0134] In some embodiments, a prime editor comprises a Cas polypeptide that comprises a circular permutant Cas variant. For example, a Cas9 polypeptide of a prime editor may be engineered such that the N-terminus and the C-terminus of a Cas9 protein (e.g., a wild type Cas9 protein, or a Cas9 nickase) are topically rearranged to retain the ability to bind DNA when complexed with a guide RNA (gRNA). An exemplary circular permutant configuration may be N-terminus-[original C-terminus]-[original N-terminus]-C-terminus. Any of the Cas9 proteins described herein, including any variant, ortholog, or naturally occurring Cas9 or equivalent thereof, may be reconfigured as a circular permutant variant.

[0135] In various embodiments, the circular permutants of a Cas protein, e.g., a Cas9, may have the following structure: N-terminus-[original C-terminus]-[optional linker]-[original N-terminus]-C-terminus. In some embodiments, a circular permutant Cas9 comprises any one of the following structures (amino acid positions as set forth in SEQ ID NO: 7567):
[0136] N-terminus-[1268-1368]-[optional linker]-[1-1267]-C-terminus;
[0137] N-terminus-[1168-1368]-[optional linker]-[1-1167]-C-terminus;
[0138] N-terminus-[1068-1368]-[optional linker]-[1-1067]-C-terminus;
[0139] N-terminus-[968-1368]-[optional linker]-[1-967]-C-terminus;
[0140] N-terminus-[868-1368]-[optional linker]-[1-867]-C-terminus;
[0141] N-terminus-[768-1368]-[optional linker]-[1-767]-C-terminus;
[0142] N-terminus-[668-1368]-[optional linker]-[1-667]-C-terminus;
[0143] N-terminus-[568-1368]-[optional linker]-[1-567]-C-terminus;
[0144] N-terminus-[468-1368]-[optional linker]-[1-467]-C-terminus;
[0145] N-terminus-[368-1368]-[optional linker]-[1-367]-C-terminus;
[0146] N-terminus-[268-1368]-[optional linker]-[1-267]-C-terminus;
[0147] N-terminus-[168-1368]-[optional linker]-[1-167]-C-terminus;
[0148] N-terminus-[68-1368]-[optional linker]-[1-67]-C-terminus;
[0149] N-terminus-[10-1368]-[optional linker]-[1-9]-C-terminus, or the corresponding circular permutants of other Cas9 proteins (including other Cas9 orthologs, variants, etc.).

[0150] In some embodiments, a circular permutant Cas9 comprises any one of the following structures (amino acid positions as set forth in SEQ ID NO: 7567-1368 amino acids of UniProtKB-Q99ZW2:
[0151] N-terminus-[102-1368]-[optional linker]-[1-101]-C-terminus;
[0152] N-terminus-[1028-1368]-[optional linker]-[1-1027]-C-terminus;
[0153] N-terminus-[1041-1368]-[optional linker]-[1-1043]-C-terminus;
[0154] N-terminus-[1249-1368]-[optional linker]-[1-1248]-C-terminus; or
[0155] N-terminus-[1300-1368]-[optional linker]-[1-1299]-C-terminus, or the corresponding circular permutants of other Cas9 proteins (including other Cas9 orthologs, variants, etc.).

[0156] In some embodiments, a circular permutant Cas9 comprises any one of the following structures (amino acid positions as set forth in SEQ ID NO: 7567-1368 amino acids of UniProtKB-Q99ZW2

[0157] N-terminus-[103-1368]-[optional linker]-[1-102]-C-terminus:

[0158] N-terminus-[1029-1368]-[optional linker]-[1-1028]-C-terminus;

[0159] N-terminus-[1042-1368]-[optional linker]-[1-1041]-C-terminus;

[0160] N-terminus-[1250-1368]-[optional linker]-[1-1249]-C-terminus; or

[0161] N-terminus-[1301-1368]-[optional linker]-[1-1300]-C-terminus, or the corresponding circular permutants of other Cas9 proteins (including other Cas9 orthologs, variants, etc.).

[0162] In some embodiments, the circular permutant can be formed by linking a C-terminal fragment of a Cas9 to an N-terminal fragment of a Cas9, either directly or by using a linker, such as an amino acid linker. In some embodiments, the C-terminal fragment may correspond to the 95% or more of the C-terminal amino acids of a Cas9 (e.g., amino acids about 1300-1368 as set forth in SEQ ID No: 7567 or corresponding amino acid positions thereof), or the 90%, 85%, 80%, 75%, 70%, 65%, 60%, 55%, 50%, 45%, 40%, 35%, 30%, 25%, 20%, 15%, 10%, or 5% or more amino acids of the C-terminal of a Cas9 (e.g., Cas9 of SEQ ID NO: 7567 or corresponding amino acid positions thereof). The N-terminal portion may correspond to 95% or more of the amino acids of the N-terminal of a Cas9 (e.g., amino acids about 1-1300 as set forth in SEQ ID No: 7567 or a ortholog or a variant thereof), or 90%, 85%, 80%, 75%, 70%, 65%, 60%, 55%, 50%, 45%, 40%, 35%, 30%, 25%, 20%, 15%, 10%, or 5% or more of the N-terminal amino acids of a Cas9 (e.g., as set forth in SEQ ID NO: 7567 or corresponding amino acid positions thereof).

[0163] In some embodiments, the circular permutant can be formed by linking a C-terminal fragment of a Cas9 to an N-terminal fragment of a Cas9, either directly or by using a linker, such as an amino acid linker. In some embodiments, the C-terminal fragment that is rearranged to the N-terminus includes or corresponds to the C-terminal 30% or less of the amino acids of a Cas9 (e.g., amino acids 1012-1368 as set forth in SEQ ID No: 7567 or corresponding amino acid positions thereof). In some embodiments, the C-terminal fragment that is rearranged to the N-terminus, includes or corresponds to the C-terminal 30%, 29%, 28%, 27%, 26%, 25%, 24%, 23%, 22%, 21%, 20%, 19%, 18%, 17%, 16%, 15%, 14%, 13%, 12%, 11%, 10%, 9%, 8%, 7%, 6%, 5%, 4%, 3%, 2%, or 1% of the amino acids of a Cas9 (e.g., as set forth in SEQ ID No: 7567 or corresponding amino acid positions thereof). In some embodiments, the C-terminal fragment that is rearranged to the N-terminus, includes or corresponds to the C-terminal 410 residues or less of a Cas9 (e.g., as set forth in SEQ ID No: 7567 or corresponding amino acid positions thereof). In some embodiments, the C-terminal portion that is rearranged to the N-terminus, includes or corresponds to the C-terminal 410, 400, 390, 380, 370, 360, 350, 340, 330, 320, 310, 300, 290, 280, 270, 260, 250, 240, 230, 220, 210, 200, 190, 180, 170, 160, 150, 140, 130, 120, 110, 100, 90, 80, 70, 60, 50, 40, 30, 20, or 10 residues of a Cas9 (e.g. as set forth in SEQ ID No: 7567 or corresponding amino acid positions thereof). In some embodiments, the C-terminal portion that is rearranged to the N-terminus includes or corresponds to the C-terminal 357, 341, 328, 120, or 69 residues of a Cas9 (e.g., as set forth in SEQ ID No: 7567 or corresponding amino acid positions thereof).

[0164] In other embodiments, circular permutant Cas9 variants may be a topological rearrangement of a Cas9 primary structure based on the following method, which is based on S. pyogenes Cas9 of SEQ ID NO: 7567: (a) selecting a circular permutant (CP) site corresponding to an internal amino acid residue of the Cas9 primary structure, which dissects the original protein into two halves: an N-terminal region and a C-terminal region; (b) modifying the Cas9 protein sequence (e.g., by genetic engineering techniques) by moving the original C-terminal region (comprising the CP site amino acid) to precede the original N-terminal region, thereby forming a new N-terminus of the Cas9 protein that now begins with the CP site amino acid residue. The CP site can be located in any domain of the Cas9 protein, including, for example, the helical-II domain, the RuvCIII domain, or the CTD domain. For example, the CP site may be located (as set forth in SEQ ID No: 7567 or corresponding amino acid positions thereof) at original amino acid residue 181, 199, 230, 270, 310, 1010, 1016, 1023, 1029, 1041, 1247, 1249, or 1282. Thus, once relocated to the N-terminus, original amino acid 181, 199, 230, 270, 310, 1010, 1016, 1023, 1029, 1041, 1247, 1249, or 1282 would become the new N-terminal amino acid. Nomenclature of these CP-Cas9 proteins may be referred to as Cas9-CP¹⁸¹, Cas9-CP¹⁹⁹, Cas9-CP²³⁰, Cas9-CP²70, Cas9-CP³¹⁰, Cas9-CP¹⁰¹⁰, Cas9-CP¹⁰¹⁶, Cas9-CPi⁰²³, Cas9-CPi⁰²⁹, Cas9-CP¹⁰⁴¹, Cas9-CP¹²⁴7, Cas9-CP¹²⁴⁹, and Cas9-CP¹²⁸², respectively. This description is not meant to be limited to making CP variants from SEQ ID NO: 18, but may be implemented to make CP variants in any Cas9 sequence, either at CP sites that correspond to these positions, or at other CP sites entirely. This description is not meant to limit the specific CP sites in any way. Virtually any CP site may be used to form a CP-Cas9 variant.

[0165] In some embodiments, a prime editor comprises a Cas9 functional variant that is of smaller molecular weight than a wild type SpCas9 protein. In some embodiments, a smaller-sized Cas9 functional variant may facilitate delivery to cells, e.g., by an expression vector, nanoparticle, or other means of delivery. In certain embodiments, a smaller-sized Cas9 functional variant is a Class 2 Type II Cas protein. In certain embodiments, a smaller-sized Cas9 functional variant is a Class 2 Type V Cas protein. In certain embodiments, a smaller-sized Cas9 functional variant is a Class 2 Type VI Cas protein.

[0166] In some embodiments, a prime editor comprises a SpCas9 that is 1368 amino acids in length and has a predicted molecular weight of 158 kilodaltons. In some embodiments, a prime editor comprises a Cas9 functional variant or functional fragment that is less than 1300 amino acids, less than 1290 amino acids, than less than 1280 amino acids, less than 1270 amino acids, less than 1260 amino acid, less than 1250 amino acids, less than 1240 amino acids, less than 1230 amino acids, less than 1220 amino acids, less than 1210 amino acids, less than 1200 amino acids, less than 1190 amino acids, less than 1180 amino acids, less than 1170 amino acids, less than 1160 amino acids, less than 1150 amino acids, less than 1140 amino acids, less than 1130 amino acids, less than 1120 amino acids, less than 1110 amino acids, less than 1100 amino acids, less than 1050 amino acids, less than 1000 amino acids, less than 950 amino acids, less than 900 amino acids, less than 850 amino acids, less than 800 amino acids, less than 750 amino acids, less than 700 amino acids, less than 650 amino acids, less than 600 amino acids, less than 550 amino acids, or less than 500 amino acids, but at least larger than about 400 amino acids and retaining the one or more functions, e.g., DNA binding function, of the Cas9 protein.

[0167] In some embodiments, the Cas protein may include any CRISPR associated protein, including but not limited to, Cas12a, Cas12b1, Cas1, Cas1B, Cas2, Cas3, Cas4, Cas5, Cas6, Cas7, Cas8, Cas9 (also known as Csn1 and Csx12), Cas10, Csy1, Csy2, Csy3, Cse1, Cse2, Csc1, Csc2, Csa5, Csn2, Csm2, Csm3, Csm4, Csm5, Csm6, Cmr1, Cmr3, Cmr4, Cmr5, Cmr6, Csb1, Csb2, Csb3, Csx17, Csx14, Csx10, Csx16, CsaX, Csx3, Csx1, Csx15, Csf1, Csf2, Csf3, Csf4, homologs thereof, or modified versions thereof, and preferably comprising a nickase mutation (e.g., a mutation corresponding to the D10A mutation of the wild type Cas9 polypeptide of SEQ ID NO: 18). In various other embodiments, the napDNAbp can be any of the following proteins: a Cas9, a Cas12a (Cpf1), a Cas12e (CasX), a Cas12d (CasY), a Cas12b1 (C2c1), a Cas13a (C2c2), a Cas12c (C2c3), a GeoCas9, a CjCas9, a Cas12g, a Cas12h, a Cas12i, a Casl3b, a Casl3c, a Casl3d, a Cas14, a Csn2, an xCas9, an SpCas9-NG, a circularly permuted Cas9, or an Argonaute (Ago) domain, or a functional variant or fragment thereof.

### Exemplary Cas Proteins and Nomenclature are Shown in Table 50 Below:

TABLE 50
Exemplary Cas proteins and nomenclature

| | |
|---|---|
| Legacy nomenclature | Current nomenclature |

type II CRISPR-Cas enzyme

| | |
|---|---|
| Cas9 | same |

type V CRISPR-Cas enzymes

| | |
|---|---|
| Cpf1 | Cas12a |
| CasX | Cas12e |
| C2c1 | Cas12b1 |
| Cas12b2 | same |
| C2c3 | Cas12c |
| CasY | Cas12d |
| C2c4 | same |
| C2c8 | same |
| C2c5 | same |
| C2c10 | same |
| C2c9 | same |

type VI CRISPR-Cas enzymes

| | |
|---|---|
| C2c2 | Cas13a |
| Cas13d | same |
| C2c7 | Cas13c |
| C2c6 | Cas13b |

[0169] In some embodiments, prime editors described herein may also comprise Cas proteins other than Cas9. For example, in some embodiments, a prime editor as described herein may comprise a Cas12a (Cpf1) polypeptide or functional variants thereof. In some embodiments, the Cas12a polypeptide comprises a mutation that reduces or abolishes the endonuclease domain of the Cas12a polypeptide. In some embodiments, the Cas12a polypeptide is a Cas12a nickase. In some embodiments, the Cas protein comprises an amino acid sequence that comprises at least about 50%, 60%, 70%, 80%, 90%, 91%, 92%, 93%, 94%, 95%, 96%, 97%, 98%, 99%, or 100% sequence identity to a naturally occurring Cas12a polypeptide.

[0170] In some embodiments, a prime editor comprises a Cas protein that is a Cas12b (C2c1) or a Cas12c (C2c3) polypeptide. In some embodiments, the Cas protein comprises an amino acid sequence that comprises at least about 50%, 60%, 70%, 80%, 90%, 91%, 92%, 93%, 94%, 95%, 96%, 97%, 98%, 99%, or 100% sequence identity to a naturally occurring Cas12b (C2c1) or Cas12c (C2c3) protein. In some embodiments, the Cas protein is a Cas12b nickase or a Cas12c nickase. In some embodiments, the Cas protein is a Cas12e, a Cas12d, a Cas13, Cas14a, Cas14b, Cas14c, Cas14d, Cas14e, Cas14f, Cas14g, Cas14h, Cas14u, or a Cas4 polypeptide. In some embodiments, the Cas protein comprises an amino acid sequence that comprises at least about 50%, 60%, 70%, 80%, 90%, 91%, 92%, 93%, 94%, 95%, 96%, 97%, 98%, 99%, or 100% sequence identity to a naturally occurring Cas12e, Cas12d, Cas13, Cas14a, Cas14b, Cas14c, Cas14d, Cas14e, Cas14f, Cas14g, Cas14h, Cas14u, or Cas qP protein. In some embodiments, the Cas protein is a Cas12e, Cas12d, Cas13, or Cas qP nickase.

### Nuclear Localization Sequences

[0171] In some embodiments, a prime editor further comprises one or more nuclear localization sequence (NLS). In some embodiments, the NLS helps promote translocation of a protein into the cell nucleus. In some embodiments, a prime editor comprises a fusion protein, e.g., a fusion protein comprising a DNA binding domain and a DNA polymerase, that comprises one or more NLSs. In some embodiments, one or more polypeptides of the prime editor are fused to or linked to one or more NLSs. In some embodiments, the prime editor comprises a DNA binding domain and a DNA polymerase domain that are provided in trans, wherein the DNA binding domain and/or the DNA polymerase domain is fused or linked to one or more NLSs.

[0172] In certain embodiments, a prime editor or prime editing complex comprises at least one NLS. In some embodiments, a prime editor or prime editing complex comprises at least two NLSs. In embodiments with at least two NLSs, the NLSs can be the same NLS, or they can be different NLSs.

[0173] In some instances, a prime editor may further comprise at least one nuclear localization sequence (NLS). In some cases, a prime editor may further comprise 1 NLS. In some cases, a prime editor may further comprise 2 NLSs. In other cases, a prime editor may further comprise 3 NLSs. In one case, a primer editor may further comprise more than 4, 5, 6, 7, 8, 9 or 10 NLSs.

[0174] In addition, the NLSs may be expressed as part of a prime editor complex. In some embodiments, a NLS can be positioned almost anywhere in a protein's amino acid sequence, and generally comprises a short sequence of three or more or four or more amino acids. The location of the NLS fusion can be at the N-terminus, the C-terminus, or positioned anywhere within a sequence of a prime editor or a component thereof (e.g., inserted between the DNA-binding domain and the DNA polymerase domain of a prime editor fusion protein, between the DNA binding domain and a linker sequence, between a DNA polymerase and a linker sequence, between two linker sequences of a prime editor fusion protein or a component thereof, in either N-terminus to C-terminus or C-terminus to N-terminus order). In some embodiments, a prime editor is fusion protein that comprises an NLS at the N terminus. In some embodiments, a prime editor is fusion protein that comprises an NLS at the C terminus. In some embodiments, a prime editor is fusion protein that comprises at least one NLS at both the N terminus and the C terminus. In some embodiments, the prime editor is a fusion protein that comprises two NLSs at the N terminus and/or the C terminus.

[0175] Any NLSs that are known in the art are also contemplated herein. The NLSs may be any naturally occurring NLS, or any non-naturally occurring NLS (e.g., an NLS with one or more mutations relative to a wild-type NLS). In some embodiments, the one or more NLSs of a prime editor comprise bipartite NLSs. In some embodiments, a nuclear localization signal (NLS) is predominantly basic. In some embodiments, the one or more NLSs of a prime editor are rich in lysine and arginine residues. In some embodiments, the one or more NLSs of a prime editor comprise proline residues. In some embodiments, a nuclear localization signal (NLS) comprises the sequence MDSLLMNRRKFLYQFKNVRWAKGRRETYLC (SEQ ID NO: 7548), KRTADGSEFESPKKKRKV (SEQ ID NO: 7600), KRTADGSEFEPKKKRKV (SEQ ID NO: 7555), SKRPAAIKKAGQAKKKK (SEQ ID NO: 7556), RQRRNELKRSF (SEQ ID NO: 7557), or NQSSNFGPMKGGNFGGRSSGPYGGGGQYFAKPRNQGGY (SEQ ID NO: 7558).

[0176] In some embodiments, a NLS is a monopartite NLS. For example, in some embodiments, a NLS is a SV40 large T antigen NLS (PKKKRKV). In some embodiments, a NLS is a bipartite NLS. In some embodiments, a bipartite NLS comprises two basic domains separated by a spacer sequence comprising a variable number of amino acids. In some embodiments, a NLS is a bipartite NLS. In some embodiments, a bipartite NLS consists of two basic domains separated by a spacer sequence comprising a variable number of amino acids. In some embodiments, the spacer amino acid sequence comprises the sequence (KRXXXXXXXXXXKKKL (Xenopus nucleoplasmin NLS) (SEQ ID NO: 7559), wherein X is any amino acid. In some embodiments, the NLS comprises a nucleoplasmin NLS sequence KRPAATKKAGQAKKKK (SEQ ID NO: 7601). In some embodiments, a NLS is a noncanonical sequences such as M9 of the hnRNP A1 protein, the influenza virus nucleoprotein NLS, and the yeast Gal4 protein NLS. In some embodiments, a NLS is a noncanonical sequences such as M9 of the hnRNP A1 protein, the influenza virus nucleoprotein NLS, and the yeast Gal4 protein NLS.

[0177] Any NLSs that are known in the art are also contemplated herein. The NLSs may be any naturally occurring NLS, or any non-naturally occurring NLS (e.g., an NLS with one or more mutations relative to a wild-type NLS). In some embodiments, the one or more NLSs of a prime editor comprise bipartite NLSs. In some embodiments, the one or more NLSs of a prime editor are rich in lysine and arginine residues. In some embodiments, the one or more NLSs of a prime editor comprise proline residues. Non-limiting examples of NLS sequences are provided in Table 51 below.

[0178] Other non-limiting examples of NLS sequences are provided in Table 51 below.

TABLE 51
Exemplary nuclear localization sequences

| Description | Sequence |
|---|---|
| NLS of SV40 Large T-AG | PKKKRKV (SEQ ID NO: 7619) |
| NLS | MKRTADGSEFESPKKKRKV (SEQ ID NO: 7547) |
| NLS | MDSLLMNRRKFLYQFKNVRWAKGRRETYLC (SEQ ID NO: |
| | 7548) |
| NLS of Nucleoplasmin | AVKRPAATKKAGQAKKKKLD (SEQ ID NO: 7549) |
| NLS of EGL-13 | MSRRRKANPTKLSENAKKLAKEVEN (SEQ ID NO: 7550) |
| NLS of C-Myc | PAAKRVKLD (SEQ ID NO: 7620) |
| NLS of Tus-protein | KLKIKRPVK (SEQ ID NO: 7621) |
| NLS of polyoma large T-AG | VSRKRPRP (SEQ ID NO: 7622) |
| NLS of Rev protein | RQARRNRRRRWRERNR (SEQ ID NO: 7551) |
| NLS of Hepatitis D virus antigen | EGAPPAKRAR (SEQ ID NO: 7552) |
| NLS of murine p53 | PPQPKKKPLDGE (SEQ ID NO: 7553) |
| C terminal linker and NLS of an | SGGSKRTADGSEFEPKKKRKV (SEQ ID NO: 7554) |
| exemplary prime editor fusion | |
| protein | |
| C Terminal NLS of an | KRTADGSEFEPKKKRKV (SEQ ID NO: 7555) |
| exemplary prime editor fusion | |
| protein | |

### Additional Prime Editor Components

[0179] A prime editor described herein may comprise additional functional domains, for example, one or more domains that modify the folding, solubility, or charge of the prime editor. In some instances, the prime editor may comprise a solubility-enhancement (SET) domain.

[0180] In some embodiments, a split intein comprises two halves of an intein protein, which may be referred to as a N-terminal half of an intein, or intein-N, and a C-terminal half of an intein, or intein-C, respectively. In some embodiments, the intein-N and the intein-C may each be fused to a protein domain (the N-terminal and the C-terminal exteins). The exteins can be any protein or polypeptides, for example, any prime editor polypeptide component. In some embodiments, the intein-N and intein-C of a split intein can associate non-covalently to form an active intein and catalyze a-trans splicing reaction. In some embodiments, the trans splicing reaction excises the two intein sequences and links the two extein sequences with a peptide bond. As a result, the intein-N and the intein-C are spliced out, and a protein domain linked to the intein-N is fused to a protein domain linked to the intein-C. essentially in same way as a contiguous intein does. In some embodiments, a split-intein is derived from a eukaryotic intein, a bacterial intein, or an archaeal intein. Preferably, the split intein so derived will possess only the amino acid sequences essential for catalyzing trans-splicing reactions. In some embodiments, an intein-N or an intein-C further comprise one or more amino acid substitutions as compared to a wild type intein-N or wild type intein-C, for example, amino acid substitutions that enhances the trans-splicing activity of the split intein. In some embodiments, the intein-C comprises 4 to 7 contiguous amino acid residues, wherein at least 4 amino acids of which are from the last $-strand of the intein from which it was derived. In some embodiments, the split intein is derived from a Ssp DnaE intein, e.g., Synechocytis sp. PCC6803, or any intein or split intein known in the art, or any functional variants or fragments thereof.

[0181] In some embodiments, a prime editor comprises one or more epitope tags. Non-limiting examples of epitope tags include histidine (His) tags, V5 tags, FLAG tags, influenza hemagglutinin (HA) tags, Myc tags, VSV-G tags, thioredoxin (Trx) tags, biotin carboxylase carrier protein (BCCP) tags, myc-tags, calmodulin-tags, polyhistidine tags, also referred to as histidine tags or His-tags, maltose binding protein (MBP)-tags, nus-tags, glutathione-S-transferase (GST)-tags, green fluorescent protein (GFP)-tags, thioredoxin-tags, S-tags, Softags (e.g., Softag 1, Softag 3), strep-tags, biotin ligase tags, FlAsH tags, V5 tags, and SBP-tags. Additional suitable sequences will be apparent to those of skill in the art. In some embodiments, the fusion protein comprises one or more His tags.

[0182] In some embodiments, a prime editor comprises one or more polypeptide domains encoded by one or more reporter genes. Examples of reporter genes include, but are not limited to, glutathione-5-transferase (GST), horseradish peroxidase (HRP), chloramphenicol acetyltransferase (CAT), beta-galactosidase, beta-glucuronidase, luciferase, green fluorescent protein (GFP), HcRed, DsRed, cyan fluorescent protein (CFP), yellow fluorescent protein (YFP), and autofluorescent proteins including blue fluorescent protein (BFP).

[0183] In some embodiments, a prime editor comprises one or more polypeptide domains that binds DNA molecules or binds other cellular molecules. Examples of binding proteins or domains include, but are not limited to, maltose binding protein (MBP), S-tag, Lex-A DNA binding domain (DBD) fusions, GAL4 DNA binding domain fusions, and herpes simplex virus (HSV) BP16 protein fusions.

[0184] In some embodiments, a prime editor comprises a protein domain that is capable of modifying the intracellular half-life of the prime editor.

[0185] In some embodiments, a prime editing complex comprises a fusion protein comprising a DNA binding domain (e.g., Cas9(H840A)) and a reverse transcriptase (e.g., a variant MMLV RT) having the following structure: [NLS]-[Cas9(H840A)]-[linker]-[MMLV_RT(D200N)(T330P)(L603W)(T306K)(W313F)], and a desired PEgRNA. In some embodiments, the prime editing complex comprises a prime editor fusion protein that has the amino acid sequence of SEQ ID NO: 7560. Sequence of an exemplary prime editor fusion protein comprising a DNA binding domain (e.g., Cas9(H840A)) and a reverse transcriptase (e.g., a variant MMLV RT) having the following structure: [NLS]-[Cas9(H840A)]-[linker]-[MMLV_RT(D200N)(T330P)(L603W)(T306K)(W313F)] and its components are shown in Table 52.

[0186] In some embodiments, a prime editing complex comprises a fusion protein comprising a DNA binding domain (e.g., Cas9((R221K N394K H840A)) and a reverse transcriptase (e.g., a variant MMLV RT) having the following structure: [NLS]-[Cas9((R221K N394K H840A)]-[linker]-[MMLV_RT(D200N)(T330P)(L603W)(T306K)(W313F)], and a desired PEgRNA. In some embodiments, the prime editing complex comprises a prime editor fusion protein that has the amino acid sequence of SEQ ID NO: 7560. Sequence of an exemplary prime editor fusion protein comprising a DNA binding domain (e.g., Cas9(H840A)) and a reverse transcriptase (e.g., a variant MMLV RT) having the following structure: [NLS]-[Cas9 (R221K N394K H840A)]-[linker]-[MMLV_RT(D200N)(T330P)(L603W)(T306K)(W313F)] and its components are shown in Table 53.

[0187] Polypeptides comprising components of a prime editor may be fused via peptide linkers, or may be provided in trans relevant to each other. For example, a reverse transcriptase may be expressed, delivered, or otherwise provided as an individual component rather than as a part of a fusion protein with the DNA binding domain. In such cases, components of the prime editor may be associated through non-peptide linkages or co-localization functions. In some embodiments, a prime editor further comprises additional components capable of interacting with, associating with, or capable of recruiting other components of the prime editor or the prime editing system. For example, a prime editor may comprise an RNA-protein recruitment polypeptide that can associate with an RNA-protein recruitment RNA aptamer. In some embodiments, an RNA-protein recruitment polypeptide can recruit, or be recruited by, a specific RNA sequence. Non limiting examples of RNA-protein recruitment polypeptide and RNA aptamer pairs include a MS2 coat protein and a MS2 RNA hairpin, a PCP polypeptide and a PP7 RNA hairpin, a Com polypeptide and a Com RNA hairpin, a Ku protein and a telomerase Ku binding RNA motif, and a Sm7 protein and a telomerase Sm7 binding RNA motif. In some embodiments, the prime editor comprises a DNA binding domain fused or linked to an RNA-protein recruitment polypeptide. In some embodiments, the prime editor comprises a DNA polymerase domain fused or linked to an RNA-protein recruitment polypeptide. In some embodiments, the DNA binding domain and the DNA polymerase domain fused to the RNA-protein recruitment polypeptide, or the DNA binding domain fused to the RNA-protein recruitment polypeptide and the DNA polymerase domain are co-localized by the corresponding RNA-protein recruitment RNA aptamer of the RNA-protein recruitment polypeptide. In some embodiments, the corresponding RNA-protein recruitment RNA aptamer fused or linked to a portion of the PEgRNA or ngRNA. For example, an MS2 coat protein fused or linked to the DNA polymerase and a MS2 hairpin installed on the PEgRNA for co-localization of the DNA polymerase and the RNA-guided DNA binding domain (e.g., a Cas9 nickase).

[0188] In some embodiments, a prime editor comprises a polypeptide domain, an MS2 coat protein (MCP), that recognizes an MS2 hairpin. In some embodiments, the nucleotide sequence of the MS2 hairpin (or equivalently referred to as the “MS2 aptamer”) is: GCCAACATGAGGATCACCCATGTCTGCAGGGCC (SEQ ID NO: 7602). In some embodiments, the amino acid sequence of the MCP is:

(SEQ ID NO: 7603)
GSASNFTQFVLVDNGGTGDVTVAPSNFANGVAEWISSNSRSQAYKVTCS
VRQSSAQNRKYTIKVEVPKVATQTVGGEELPVAGWRSYLNMELTIPIFA
TNSDCELIVKAMQGLLKDGNPIPSAIAANSGIY.

[0189] In certain embodiments, components of a prime editor are directly fused to each other. In certain embodiments, components of a prime editor are associated to each other via a linker.

[0190] As used herein, a linker can be any chemical group or a molecule linking two molecules or moieties, e.g., a DNA binding domain and a polymerase domain of a prime editor. In some embodiments, a linker is an organic molecule, group, polymer, or chemical moiety. In some embodiments, the linker comprises a non-peptide moiety. The linker may be as simple as a covalent bond, or it may be a polymeric linker many atoms in length, for example, a polynucleotide sequence. In certain embodiments, the linker is a covalent bond (e.g., a carbon-carbon bond, disulfide bond, carbon-heteroatom bond, etc.).

[0191] In certain embodiments, two or more components of a prime editor are linked to each other by a peptide linker. In some embodiments, a peptide linker is 5-100 amino acids in length, for example, 2, 3, 4, 5, 6, 7, 8, 9, 10, 11, 12, 13, 14, 15, 16, 17, 18, 19, 20, 21, 22, 23, 24, 25, 26, 27, 28, 29, 30, 30-35, 35-40, 40-45, 45-50, 50-60, 60-70, 70-80, 80-90, 90-100, 100-150, or 150-200 amino acids in length. In some embodiments, the peptide linker is 16 amino acids in length, 24 amino acids in length, 64 amino acids in length, or 96 amino acids in length.

[0192] In some embodiments, the linker comprises the amino acid sequence (GGGGS)n (SEQ ID NO: 7625), (G)n (SEQ ID NO: 7613), (EAAAK)n (SEQ ID NO: 7614), (GGS)n (SEQ ID NO: 7615), (SGGS)n (SEQ IDNO: 7616), (XP)n(SEQ ID NO: 7617) or any combination thereof, wherein n is independently an integer between 1 and 30, and wherein X is any amino acid. In some embodiments, the linker comprises the amino acid sequence (GGS)n (SEQ ID NO: 7618), wherein n is 1, 3, or 7. In some embodiments, the linker comprises the amino acid sequence SGSETPGTSESATPES (SEQ ID NO: 7604). In some embodiments, the linker comprises the amino acid sequence SGGSSGGSSGSETPGTSESATPESSGGSSGGS (SEQ ID NO: 7609). In some embodiments, the linker comprises the amino acid sequence SGGSGGSGGS (SEQ ID NO: 7605). In some embodiments, the linker comprises the amino acid sequence SGGS (SEQ ID NO: 7610). In other embodiments, the linker comprises the amino acid sequence SGGSSGGSSGSETPGTSESATPESAGSYPYDVPDYAGSAAPAAKKKKLDGSGSGGSSGGS (SEQ ID NO: 7606).

[0193] In some embodiments, a linker comprises 1-100 amino acids. In some embodiments, the linker comprises the amino acid sequence SGSETPGTSESATPES (SEQ ID NO: 7604). In some embodiments, the linker comprises the amino acid sequence SGGSSGGSSGSETPGTSESATPESSGGSSGGS (SEQ ID NO: 7609). In some embodiments, the linker comprises the amino acid sequence SGGSGGSGGS (SEQ ID NO: 7605). In some embodiments, the linker comprises the amino acid sequence SGGS (SEQ ID NO: 7610). In some embodiments, the linker comprises the amino acid sequence GGSGGS (SEQ ID NO: 7611), GGSGGSGGS (SEQ ID NO: 7612), SGGSSGGSSGSETPGTSESATPESAGSYPYDVPDYAGSAAPAAKKKKLDGSGSGGSSGGS (SEQ ID NO: 7606), or SGGSSGGSSGSETPGTSESATPESSGGSSGGSS (SEQ ID NO: 7563).

[0194] In certain embodiments, two or more components of a prime editor are linked to each other by a non-peptide linker. In some embodiments, the linker is a carbon-nitrogen bond of an amide linkage. In certain embodiments, the linker is a cyclic or acyclic, substituted or unsubstituted, branched or unbranched aliphatic or heteroaliphatic linker. In certain embodiments, the linker is polymeric (e.g., polyethylene, polyethylene glycol, polyamide, polyester, etc.). In certain embodiments, the linker comprises a monomer, dimer, or polymer of aminoalkanoic acid. In certain embodiments, the linker comprises an aminoalkanoic acid (e.g., glycine, ethanoic acid, alanine, beta-alanine, 3-aminopropanoic acid, 4-aminobutanoic acid, 5-pentanoic acid, etc.). In certain embodiments, the linker comprises a monomer, dimer, or polymer of aminohexanoic acid (Ahx). In certain embodiments, the linker is based on a carbocyclic moiety (e.g., cyclopentane, cyclohexane). In other embodiments, the linker comprises a polyethylene glycol moiety (PEG). In certain embodiments, the linker comprises an aryl or heteroaryl moiety. In certain embodiments, the linker is based on a phenyl ring. The linker may include functionalized moieties to facilitate attachment of a nucleophile (e.g., thiol, amino) from the peptide to the linker. Any electrophile may be used as part of the linker. Exemplary electrophiles include, but are not limited to, activated esters, activated amides, Michael acceptors, alkyl halides, aryl halides, acyl halides, and isothiocyanates.

[0195] Components of a prime editor may be connected to each other in any order. In some embodiments, the DNA binding domain and the DNA polymerase domain of a prime editor may be fused to form a fusion protein or may be joined by a peptide or protein linker, in any order from the N terminus to the C terminus. In some embodiments, a prime editor comprises a DNA binding domain fused or linked to the C-terminal end of a DNA polymerase domain. In some embodiments, a prime editor comprises a DNA binding domain fused or linked to the N-terminal end of a DNA polymerase domain. In some embodiments, the prime editor comprises a fusion protein comprising the structure NH2-[DNA binding domain]-[polymerase]-COOH; or NH2-[polymerase]-[DNA binding domain]-COOH, wherein each instance of “]-[” indicates the presence of an optional linker sequence. In some embodiments, a prime editor comprises a fusion protein and a DNA polymerase domain provided in trans, wherein the fusion protein comprises the structure NH2-[DNA binding domain]-[RNA-protein recruitment polypeptide]-COOH. In some embodiments, a prime editor comprises a fusion protein and a DNA binding domain provided in trans, wherein the fusion protein comprises the structure NH2-[DNA polymerase domain]-[RNA-protein recruitment polypeptide]-COOH.

[0196] In some embodiments, a prime editor fusion protein, a polypeptide component of a prime editor, or a polynucleotide encoding the prime editor fusion protein or polypeptide component, may be split into an N-terminal half and a C-terminal half or polypeptides that encode the N-terminal half and the C terminal half, and provided to a target DNA in a cell separately. For example, in certain embodiments, a prime editor fusion protein may be split into a N-terminal and a C-terminal half for separate delivery in AAV vectors, and subsequently translated and colocalized in a target cell to reform the complete polypeptide or prime editor protein. In such cases, separate halves of a protein or a fusion protein may each comprise a split-intein to facilitate colocalization and reformation of the complete protein or fusion protein by the mechanism of intein facilitated trans splicing. In some embodiments, a prime editor comprises a N-terminal half fused to an intein-N, and a C-terminal half fused to an intein-C, or polynucleotides or vectors (e.g., AAV vectors) encoding each thereof. When delivered and/or expressed in a target cell, the intein-N and the intein-C can be excised via protein trans-splicing, resulting in a complete prime editor fusion protein in the target cell. In some embodiments, an exemplary protein described herein may lack a methionine residue at the N-terminus.

[0197] In some embodiments, a prime editor fusion protein comprises a Cas9(H840A) nickase and a wild type M-MLV RT. In some embodiments, a prime editor fusion protein comprises a Cas9(H840A) nickase and a M-MLV RT that comprises amino acid substitutions D200N, T330P, T306K, W313F, and L603W compared to a wild type M-MLV RT. In some embodiments, a prime editor fusion protein comprises a Cas9(H840A) nickase and a M-MLV RT that comprises amino acid substitutions D200N, T330P, T306K, W313F, and L603W compared to a wild type M-MLV RT. The amino acid sequence of an exemplary prime editor fusion protein and its individual components in shown in Table 52. In some embodiments, a prime editor fusion protein comprises a Cas9 (R221K N394K H840A) nickase and a M-MLV RT that comprises amino acid substitutions D200N, T330P, T306K, W313F, and L603W compared to a wild type M-MLV RT. The amino acid sequence of an exemplary Prime editor fusion protein and its individual components in shown in Table 53. In some embodiments an exemplary prime editor protein may comprise an amino acid sequence as set forth in any of the SEQ ID NOs: 7560, 7561, 7565 or 7566.

[0198] In various embodiments, a prime editor fusion protein comprises an amino acid sequence that is at least about 70% identical, at least about 80% identical, at least about 90% identical, at least about 95% identical, at least about 96% identical, at least about 97% identical, at least about 98% identical, at least about 99% identical, at least about 99.5% identical, or at least about 99.9% identical to any one of the exemplary prime editor fusion proteins provided herein, or any of the prime editor fusion sequences described herein or known in the art.

TABLE 52
lists an exemplary prime editor fusion protein and its individual components

| DESCRIPTION | SEQUENCE |
|---|---|
| Exemplary Prime | MKRTADGSEFESPKKKRKVDKKYSIGLDIGTNSVGWAVITDEYKVPSKKFK |
| Editor [NLS]- | VLGNTDRHSIKKNLIGALLFDSGETAEATRLKRTARRRYTRRKNRICYLQ |
| [Cas9(H840A)]- | EIFSNEMAKVDDSFFHRLEESFLVEEDKKHERHPIFGNIVDEVAYHEKYPT |
| [linker]- | IYHLRKKLVDSTDKADLRLIYLALAHMIKFRGHFLIEGDLNPDNSDVDKL |
| [MMLV_RT(D200N) | FIQLVQTYNQLFEENPINASGVDAKAILSARLSKSRRLENLIAQLPGEKKN |
| (T330P)(L603W) | GLFGNLIALSLGLTPNFKSNFDLAEDAKLQLSKDTYDDDLDNLLAQIGDQ |
| (T306K)(W313F)]- | YADLFLAAKNLSDAILLSDILRVNTEITKAPLSASMIKRYDEHHQDLTLLK |
| [NLS] (SEQ | ALVRQQLPEKYKEIFFDQSKNGYAGYIDGGASQEEFYKFIKPILEKMDGT |
| ID NO: 7560) | EELLVKLNREDLLRKQRTFDNGSIPHQIHLGELHAILRRQEDFYPFLKDN |
| | REKIEKILTFRIPYYVGPLARGNSRFAWMTRKSEETITPWNFEEVVDKGAS |
| | AQSFIERMTNFDKNLPNEKVLPKHSLLYEYFTVYNELTKVKYVTEGMRK |
| | PAFLSGEQKKAIVDLLFKTNRKVTVKQLKEDYFKKIECFDSVEISGVEDR |
| | FNASLGTYHDLLKIIKDKDFLDNEENEDILEDIVLTLTLFEDREMIEERLKT |
| | YAHLFDDKVMKQLKRRRYTGWGRLSRKLINGIRDKQSGKTILDFLKSDG |
| | FANRNFMQLIHDDSLTFKEDIQKAQVSGQGDSLHEHIANLAGSPAIKKGIL |
| | QTVKVVDELVKVMGRHKPENIVIEMARENQTTQKGQKNSRERMKRIEE |
| | GIKELGSQILKEHPVENTQLQNEKLYLYYLQNGRDMYVDQELDINRLSDY |
| | DVDAIVPQSFLKDDSIDNKVLTRSDKNRGKSDNVPSEEVVKKMKNYWRQ |
| | LLNAKLITQRKFDNLTKAERGGLSELDKAGFIKRQLVETRQITKHVAQIL |
| | DSRMNTKYDENDKLIREVKVITLKSKLVSDFRKDFQFYKVREINNYHHAH |
| | DAYLNAVVGTALIKKYPKLESEFVYGDYKVYDVRKMIAKSEQEIGKATAK |
| | YFFYSNIMNFFKTEITLANGEIRKRPLIETNGETGEIVWDKGRDFATVRKV |
| | LSMPQVNIVKKTEVQTGGFSKESILPKRNSDKLIARKKDWDPKKYGGFD |
| | SPTVAYSVLVVAKVEKGKSKKLKSVKELLGITIMERSSFEKNPIDFLEAKG |
| | YKEVKKDLIIKLPKYSLFELENGRKRMLASAGELQKGNELALPSKYVNFL |
| | YLASHYEKLKGSPEDNEQKQLFVEQHKHYLDEIIEQISEFSKRVILADANL |
| | DKVLSAYNKHRDKPIREQAENIIHLFTLTNLGAPAAFKYFDTTIDRKRYTS |
| | TKEVLDATLIHQSITGLYETRIDLSQLGGDSGGSSGGSSGSETPGTSESATP |
| | ESSGGSSGGSSTLNIEDEYRLHETSKEPDVSLGSTWLSDFPQAWAETGGMGLAVR |
| | QAPLIIPLKATSTPVSIKQYPMSQEARLGIKPHIQRLLDQGILVPCQSPWNTPLLPVK |
| | KPGTNDYRPVQDLREVNKRVEDIHPTVPNPYNLLSGLPPSHQWYTVLDLKDAFFC |
| | LRLHPTSQPLFAFEWRDPEMGISGQLTWTRLPQGFKNSPTLFNEALHRDLADFRI |
| | QHPDLILLQYVDDLLLAATSELDCQQGTRALLQTLGNLGYRASAKKAQICQKQVKY |
| | LGYLLKEGQRWLTEARKETVMGQPTPKTPRQLREFLGKAGFCRLFIPGFAEMAAP |
| | LYPLTKPGTLFNWGPDQQKAYQEIKQALLTAPALGLPDLTKPFELFVDEKQGYAK |
| | GVLTQKLGPWRRPVAYLSKKLDPVAAGWPPCLRMVAAIAVLTKDAGKLTMGQPLV |
| | ILAPHAVEALVKQPPDRWLSNARMTHYQALLLDTDRVQFGPVVALNPATLLPLPEE |
| | GLQHNCLDILAEAHGTRPDLTDQPLPDADHTWYTDGSSLLQEGQRKAGAAVTTET |
| | EVIWAKALPAGTSAQRAELIALTQALKMAEGKKLNVYTDSRYAFATAHIHGEIYRRRG |
| | WLTSEGKEIKNKDEILALLKALFLPKRLSIIHCPGHQKGHSAEARGNRMADQAARK |
| | AAITETPDTSTLLIENSSPSGGSKRTADGSEFEPKKKRKV |
| | KEY: |
| | NUCLEAR LOCALIZATION SEQUENCE (NLS) |
| | CAS9(H840A) |
| | 33-AMINO ACID LINKER |
| | M-MLV REVERSE TRANSCRIPTASE |
| Exemplary Prime | KRTADGSEFESPKKKRKVDKKYSIGLDIGTNSVGWAVITDEYKVPSKKFKVLGNTDRHSIKKNL |
| Editor [NLS]- | IGALLFDSGETAEATRLKRTARRRYTRRKNRICYLQEIFSNEMAKVDDSFFHRLEESFLVEEDKK |
| [Cas9(H840A)]- | HERHPIFGNIVDEVAYHEKYPTIYHLRKKLVDSTDKADLRLIYLALAHMIKFRGHFLIEGDLNPD |
| [linker]- | NSDVDKLFIQLVQTYNQLFEENPINASGVDAKAILSARLSKSRRLENLIAQLPGEKKNGLFGNLIA |
| [MMLV_RT(D200N) | LSLGLTPNFKSNFDLAEDAKLQLSKDTYDDDLDNLLAQIGDQYADLFLAAKNLSDAILLSDILRV |
| (T330P)(L603W) | NTEITKAPLSASMIKRYDEHHQDLTLLKALVRQQLPEKYKEIFFDQSKNGYAGYIDGGASQEEF |
| (T306K)(W313F)]- | YKFIKPILEKMDGTEELLVKLNREDLLRKQRTFDNGSIPHQIHLGELHAILRRQEDFYPFLKDNRE |
| [NLS] | KIEKILTFRIPYYVGPLARGNSRFAWMTRKSEETITPWNFEEVVDKGASAQSFIERMTNFDKNLP |
| without N- | NEKVLPKHSLLYEYFTVYNELTKVKYVTEGMRKPAFLSGEQKKAIVDLLFKTNRKVTVKQLKE |
| terminal | DYFKKIECFDSVEISGVEDRFNASLGTYHDLLKIIKDKDFLDNEENEDILEDIVLTLTLFEDREMIE |
| methionine | ERLKTYAHLFDDKVMKQLKRRRYTGWGRLSRKLINGIRDKQSGKTILDFLKSDGFANRNFMQL |
| (SEQ ID NO: | IHDDSLTFKEDIQKAQVSGQGDSLHEHIANLAGSPAIKKGILQTVKVVDELVKVMGRHKPENIVI |
| 7561) | EMARENQTTQKGQKNSRERMKRIEEGIKELGSQILKEHPVENTQLQNEKLYLYYLQNGRDMYV |
| | DQELDINRLSDYDVDAIVPQSFLKDDSIDNKVLTRSDKNRGKSDNVPSEEVVKKMKNYWRQLL |
| | NAKLITQRKFDNLTKAERGGLSELDKAGFIKRQLVETRQITKHVAQILDSRMNTKYDENDKLIR |
| | EVKVITLKSKLVSDFRKDFQFYKVREINNYHHAHDAYLNAVVGTALIKKYPKLESEFVYGDYK |
| | VYDVRKMIAKSEQEIGKATAKYFFYSNIMNFFKTEITLANGEIRKRPLIETNGETGEIVWDKGRD |
| | FATVRKVLSMPQVNIVKKTEVQTGGFSKESILPKRNSDKLIARKKDWDPKKYGGFDSPTVAYSV |
| | LVVAKVEKGKSKKLKSVKELLGITIMERSSFEKNPIDFLEAKGYKEVKKDLIIKLPKYSLFELENG |
| | RKRMLASAGELQKGNELALPSKYVNFLYLASHYEKLKGSPEDNEQKQLFVEQHKHYLDEIIEQI |
| | SEFSKRVILADANLDKVLSAYNKHRDKPIREQAENIIHLFTLTNLGAPAAFKYFDTTIDRKRYTST |
| | KEVLDATLIHQSITGLYETRIDLSQLGGDSGGSSGGSSGSETPGTSESATPESSGGSSGGSSTLNIE |
| | DEYRLHETSKEPDVSLGSTWLSDFPQAWAETGGMGLAVRQAPLIIPLKATSTPVSIKQYPMSQE |
| | ARLGIKPHIQRLLDQGILVPCQSPWNTPLLPVKKPGTNDYRPVQDLREVNKRVEDIHPTVPNPYN |
| | LLSGLPPSHQWYTVLDLKDAFFCLRLHPTSQPLFAFEWRDPEMGISGQLTWTRLPQGFKNSPTLF |
| | NEALHRDLADFRIQHPDLILLQYVDDLLLAATSELDCQQGTRALLQTLGNLGYRASAKKAQICQ |
| | KQVKYLGYLLKEGQRWLTEARKETVMGQPTPKTPRQLREFLGKAGFCRLFIPGFAEMAAPLYP |
| | LTKPGTLFNWGPDQQKAYQEIKQALLTAPALGLPDLTKPFELFVDEKQGYAKGVLTQKLGPWR |
| | RPVAYLSKKLDPVAAGWPPCLRMVAAIAVLTKDAGKLTMGQPLVILAPHAVEALVKQPPDRW |
| | LSNARMTHYQALLLDTDRVQFGPVVALNPATLLPLPEEGLQHNCLDILAEAHGTRPDLTDQPLP |
| | DADHTWYTDGSSLLQEGQRKAGAAVTTETEVIWAKALPAGTSAQRAELIALTQALKMAEGKK |
| | LNVYTDSRYAFATAHIHGEIYRRRGWLTSEGKEIKNKDEILALLKALFLPKRLSIIHCPGHQKGHS |
| | AEARGNRMADQAARKAAITETPDTSTLLIENSSPSGGSKRTADGSEFEPKKKRKV |
| -N-TERMINAL | MKRTADGSEFESPKKKRKV |
| NLS | |
| (SEQ ID NO: | |
| 7547) | |
| CAS9(H840A) | DKKYSIGLDIGTNSVGWAVITDEYKVPSKKFKVLGNTDRHSIKKNLIGALLFDS |
| (MET MINUS) | GETAEATRLKRTARRRYTRRKNRICYLQEIFSNEMAKVDDSFFHRLEESFLVEE |
| (SEQ ID NO: | DKKHERHPIFGNIVDEVAYHEKYPTIYHLRKKLVDSTDKADLRLIYLALAHMI |
| 7562) | KFRGHFLIEGDLNPDNSDVDKLFIQLVQTYNQLFEENPINASGVDAKAILSARL |
| | SKSRRLENLIAQLPGEKKNGLFGNLIALSLGLTPNFKSNFDLAEDAKLQLSKDT |
| | YDDDLDNLLAQIGDQYADLFLAAKNLSDAILLSDILRVNTEITKAPLSASMIKR |
| | YDEHHQDLTLLKALVRQQLPEKYKEIFFDQSKNGYAGYIDGGASQEEFYKFIK |
| | PILEKMDGTEELLVKLNREDLLRKQRTFDNGSIPHQIHLGELHAILRRQEDFYP |
| | FLKDNREKIEKILTFRIPYYVGPLARGNSRFAWMTRKSEETITPWNFEEVVDKG |
| | ASAQSFIERMTNFDKNLPNEKVLPKHSLLYEYFTVYNELTKVKYVTEGMRKP |
| | AFLSGEQKKAIVDLLFKTNRKVTVKQLKEDYFKKIECFDSVEISGVEDRFNAS |
| | LGTYHDLLKIIKDKDFLDNEENEDILEDIVLTLTLFEDREMIEERLKTYAHLFDD |
| | KVMKQLKRRRYTGWGRLSRKLINGIRDKQSGKTILDFLKSDGFANRNFMQLI |
| | HDDSLTFKEDIQKAQVSGQGDSLHEHIANLAGSPAIKKGILQTVKVVDELVKV |
| | MGRHKPENIVIEMARENQTTQKGQKNSRERMKRIEEGIKELGSQILKEHPVEN |
| | TQLQNEKLYLYYLQNGRDMYVDQELDINRLSDYDVDAIVPQSFLKDDSIDNK |
| | VLTRSDKNRGKSDNVPSEEVVKKMKNYWRQLLNAKLITQRKFDNLTKAERG |
| | GLSELDKAGFIKRQLVETRQITKHVAQILDSRMNTKYDENDKLIREVKVITLKS |
| | KLVSDFRKDFQFYKVREINNYHHAHDAYLNAVVGTALIKKYPKLESEFVYGD |
| | YKVYDVRKMIAKSEQEIGKATAKYFFYSNIMNFFKTEITLANGEIRKRPLIETN |
| | GETGEIVWDKGRDFATVRKVLSMPQVNIVKKTEVQTGGFSKESILPKRNSDKL |
| | IARKKDWDPKKYGGFDSPTVAYSVLVVAKVEKGKSKKLKSVKELLGITIMERS |
| | SFEKNPIDFLEAKGYKEVKKDLIIKLPKYSLFELENGRKRMLASAGELQKGNE |
| | LALPSKYVNFLYLASHYEKLKGSPEDNEQKQLFVEQHKHYLDEIIEQISEFSKR |
| | VILADANLDKVLSAYNKHRDKPIREQAENIIHLFTLTNLGAPAAFKYFDTTIDR |
| | KRYTSTKEVLDATLIHQSITGLYETRIDLSQLGGD |
| LINKER BETWEEN | SGGSSGGSSGSETPGTSESATPESSGGSSGGSS |
| CAS9 DOMAIN | |
| AND RT DOMAIN | |
| (33 AMINO ACIDS) | |
| (SEQ ID NO: | |
| 7563) | |
| MMLV_RT | TLNIEDEYRLHETSKEPDVSLGSTWLSDFPQAWAETGGMGLAVRQAPLIIPLK |
| D200N | ATSTPVSIKQYPMSQEARLGIKPHIQRLLDQGILVPCQSPWNTPLLPVKKPGTN |
| T330P | DYRPVQDLREVNKRVEDIHPTVPNPYNLLSGLPPSHQWYTVLDLKDAFFCLR |
| L603W | LHPTSQPLFAFEWRDPEMGISGQLTWTRLPQGFKNSPTLFNEALHRDLADFRI |
| T306K | QHPDLILLQYVDDLLLAATSELDCQQGTRALLQTLGNLGYRASAKKAQICQK |
| W313F | QVKYLGYLLKEGQRWLTEARKETVMGQPTPKTPRQLREFLGKAGFCRLFIPG |
| (SEQ ID NO: | FAEMAAPLYPLTKPGTLFNWGPDQQKAYQEIKQALLTAPALGLPDLTKPFELF |
| 7564) | VDEKQGYAKGVLTQKLGPWRRPVAYLSKKLDPVAAGWPPCLRMVAAIAVLT |
| | KDAGKLTMGQPLVILAPHAVEALVKQPPDRWLSNARMTHYQALLLDTDRVQ |
| | FGPVVALNPATLLPLPEEGLQHNCLDILAEAHGTRPDLTDQPLPDADHTWYTD |
| | GSSLLQEGQRKAGAAVTTETEVIWAKALPAGTSAQRAELIALTQALKMAEGK |
| | KLNVYTDSRYAFATAHIHGEIYRRRGWLTSEGKEIKNKDEILALLKALFLPKRL |
| | SIIHCPGHQKGHSAEARGNRMADQAARKAAITETPDTSTLLIENSSP |
| -C-TERMINAL | SGGSKRTADGSEFEPKKKRKV |
| Linker and NLS | |
| (SEQ ID NO: | |
| 7554) | |
| C Terminal NLS | KRTADGSEFEPKKKRKV |
| (SEQ ID NO: 7555 | |

TABLE 53
Amino acid sequences of an exemplary PE fusion protein and its individual components

| SEQ ID | | |
|---|---|---|
| NO. | DESCRIPTION | SEQUENCE |
| 7565 | Exemplary prime editor | MKRTADGSEFESPKKKRKVDKKYSIGLDIGTNSVGWAVITDEYKV |
| | [NLS]-[Cas9((R220K) | PSKKFKVLGNTDRHSIKKNLIGALLFDSGETAEATRLKRTARRR |
| | (R393K)(H839A)]- | YTRRKNRICYLQEIFSNEMAKVDDSFFHRLEESFLVEEDKKHER |
| | [linker]- | HPIFGNIVDEVAYHEKYPTIYHLRKKLVDSTDKADLRLIYLALAH |
| | [MMLV_RT(D200N)(T330P) | MIKFRGHFLIEGDLNPDNSDVDKLFIQLVQTYNQLFEENPINASG |
| | (L603W)(T306K)(W313F)]- | VDAKAILSARLSKSRKLENLIAQLPGEKKNGLFGNLIALSLGLTP |
| | [NLS] | NFKSNFDLAEDAKLQLSKDTYDDDLDNLLAQIGDQYADLFLAAK |
| | | NLSDAILLSDILRVNTEITKAPLSASMIKRYDEHHQDLTLLKALV |
| | | RQQLPEKYKEIFFDQSKNGYAGYIDGGASQEEFYKFIKPILEKMD |
| | | GTEELLVKLKREDLLRKQRTFDNGSIPHQIHLGELHAILRRQED |
| | | FYPFLKDNREKIEKILTFRIPYYVGPLARGNSRFAWMTRKSEETI |
| | | TPWNFEEVVDKGASAQSFIERMTNFDKNLPNEKVLPKHSLLYEY |
| | | FTVYNELTKVKYVTEGMRKPAFLSGEQKKAIVDLLFKTNRKVT |
| | | VKQLKEDYFKKIECFDSVEISGVEDRFNASLGTYHDLLKIIKDKD |
| | | FLDNEENEDILEDIVLTLTLFEDREMIEERLKTYAHLFDDKVMK |
| | | QLKRRRYTGWGRLSRKLINGIRDKQSGKTILDFLKSDGFANRNF |
| | | MQLIHDDSLTFKEDIQKAQVSGQGDSLHEHIANLAGSPAIKKGIL |
| | | QTVKVVDELVKVMGRHKPENIVIEMARENQTTQKGQKNSRER |
| | | MKRIEEGIKELGSQILKEHPVENTQLQNEKLYLYYLQNGRDMY |
| | | VDQELDINRLSDYDVDAIVPQSFLKDDSIDNKVLTRSDKNRGKSD |
| | | NVPSEEVVKKMKNYWRQLLNAKLITQRKFDNLTKAERGGLSEL |
| | | DKAGFIKRQLVETRQITKHVAQILDSRMNTKYDENDKLIREVKV |
| | | ITLKSKLVSDFRKDFQFYKVREINNYHHAHDAYLNAVVGTALIK |
| | | KYPKLESEFVYGDYKVYDVRKMIAKSEQEIGKATAKYFFYSNIM |
| | | NFFKTEITLANGEIRKRPLIETNGETGEIVWDKGRDFATVRKVLS |
| | | MPQVNIVKKTEVQTGGFSKESILPKRNSDKLIARKKDWDPKKYG |
| | | GFDSPTVAYSVLVVAKVEKGKSKKLKSVKELLGITIMERSSFEKN |
| | | PIDFLEAKGYKEVKKDLIIKLPKYSLFELENGRKRMLASAGELQ |
| | | KGNELALPSKYVNFLYLASHYEKLKGSPEDNEQKQLFVEQHKH |
| | | YLDEIIEQISEFSKRVILADANLDKVLSAYNKHRDKPIREQAENII |
| | | HLFTLTNLGAPAAFKYFDTTIDRKRYTSTKEVLDATLIHQSITGL |
| | | YETRIDLSQLGGDSGGSSGGSKRTADGSEFESPKKKRKVSGGSSG |
| | | GSTLNIEDEYRLHETSKEPDVSLGSTWLSDFPQAWAETGGMGLAVRQAP |
| | | LIIPLKATSTPVSIKQYPMSQEARLGIKPHIQRLLDQGILVPCQSPWNTPLL |
| | | PVKKPGTNDYRPVQDLREVNKRVEDIHPTVPNPYNLLSGLPPSHQWYTV |
| | | LDLKDAFFCLRLHPTSQPLFAFEWRDPEMGISGQLTWTRLPQGFKNSPT |
| | | LFNEALHRDLADFRIQHPDLILLQYVDDLLLAATSELDCQQGTRALLQTL |
| | | GNLGYRASAKKAQICQKQVKYLGYLLKEGQRWLTEARKETVMGQPTPK |
| | | TPRQLREFLGKAGFCRLFIPGFAEMAAPLYPLTKPGTLFNWGPDQQKAY |
| | | QEIKQALLTAPALGLPDLTKPFELFVDEKQGYAKGVLTQKLGPWRRPVA |
| | | YLSKKLDPVAAGWPPCLRMVAAIAVLTKDAGKLTMGQPLVILAPHAVEA |
| | | LVKQPPDRWLSNARMTHYQALLLDTDRVQFGPVVALNPATLLPLPEEGL |
| | | QHNCLDILAEAHGTRPDLTDQPLPDADHTWYTDGSSLLQEGQRKAGAA |
| | | VTTETEVIWAKALPAGTSAQRAELIALTQALKMAEGKKLNVYTDSRYAFA |
| | | TAHIHGEIYRRRGWLTSEGKEIKNKDEILALLKALFLPKRLSIIHCPGHQK |
| | | GHSAEARGNRMADQAARKAAITETPDTSTLLIENSSPSGGSKRTADGSEF |
| | | ESPKKKRKVGSGPAAKRVKLD |
| | | KEY: |
| | | N-terminal bipartiteSV40NLS |
| | | CAS9(R221K N394K H840A) |
| | | SGGSx2-met-bpSV40NLS-SGGSx2 LINKER |
| | | M-MLV D200N T306K W313F T330P L603W REVERSE TRANSCRIPTASE |
| | | C-terminal linker- NLS1 |
| | | C-terminal linker-NLS2 |
| 7566 | Exemplary prime editor | KRTADGSEFESPKKKRKVDKKYSIGLDIGTNSVGWAVITDEYKVPSK |
| | [NLS]-[Cas9((R220K) | KFKVLGNTDRHSIKKNLIGALLFDSGETAEATRLKRTARRRYTRRKN |
| | (R393K)(H839A)]- | RICYLQEIFSNEMAKVDDSFFHRLEESFLVEEDKKHERHPIFGNIVDE |
| | [linker]- | VAYHEKYPTIYHLRKKLVDSTDKADLRLIYLALAHMIKFRGHFLIEG |
| | [MMLV_RT(D200N)(T330P) | DLNPDNSDVDKLFIQLVQTYNQLFEENPINASGVDAKAILSARLSKS |
| | (L603W)(T306K)(W313F)]- | RKLENLIAQLPGEKKNGLFGNLIALSLGLTPNFKSNFDLAEDAKLQL |
| | [NLS] without N | SKDTYDDDLDNLLAQIGDQYADLFLAAKNLSDAILLSDILRVNTEIT |
| | terminal methionine | KAPLSASMIKRYDEHHQDLTLLKALVRQQLPEKYKEIFFDQSKNGY |
| | | AGYIDGGASQEEFYKFIKPILEKMDGTEELLVKLKREDLLRKQRTFD |
| | | NGSIPHQIHLGELHAILRRQEDFYPFLKDNREKIEKILTFRIPYYVGPL |
| | | ARGNSRFAWMTRKSEETITPWNFEEVVDKGASAQSFIERMTNFDKN |
| | | LPNEKVLPKHSLLYEYFTVYNELTKVKYVTEGMRKPAFLSGEQKKA |
| | | IVDLLFKTNRKVTVKQLKEDYFKKIECFDSVEISGVEDRFNASLGTY |
| | | HDLLKIIKDKDFLDNEENEDILEDIVLTLTLFEDREMIEERLKTYAHLF |
| | | DDKVMKQLKRRRYTGWGRLSRKLINGIRDKQSGKTILDFLKSDGFA |
| | | NRNFMQLIHDDSLTFKEDIQKAQVSGQGDSLHEHIANLAGSPAIKKG |
| | | ILQTVKVVDELVKVMGRHKPENIVIEMARENQTTQKGQKNSRERM |
| | | KRIEEGIKELGSQILKEHPVENTQLQNEKLYLYYLQNGRDMYVDQE |
| | | LDINRLSDYDVDAIVPQSFLKDDSIDNKVLTRSDKNRGKSDNVPSEE |
| | | VVKKMKNYWRQLLNAKLITQRKFDNLTKAERGGLSELDKAGFIKR |
| | | QLVETRQITKHVAQILDSRMNTKYDENDKLIREVKVITLKSKLVSDF |
| | | RKDFQFYKVREINNYHHAHDAYLNAVVGTALIKKYPKLESEFVYGD |
| | | YKVYDVRKMIAKSEQEIGKATAKYFFYSNIMNFFKTEITLANGEIRK |
| | | RPLIETNGETGEIVWDKGRDFATVRKVLSMPQVNIVKKTEVQTGGFS |
| | | KESILPKRNSDKLIARKKDWDPKKYGGFDSPTVAYSVLVVAKVEKG |
| | | KSKKLKSVKELLGITIMERSSFEKNPIDFLEAKGYKEVKKDLIIKLPK |
| | | YSLFELENGRKRMLASAGELQKGNELALPSKYVNFLYLASHYEKLK |
| | | GSPEDNEQKQLFVEQHKHYLDEIIEQISEFSKRVILADANLDKVLSAY |
| | | NKHRDKPIREQAENIIHLFTLTNLGAPAAFKYFDTTIDRKRYTSTKEV |
| | | LDATLIHQSITGLYETRIDLSQLGGDSGGSSGGSKRTADGSEFESPKK |
| | | KRKVSGGSSGGSTLNIEDEYRLHETSKEPDVSLGSTWLSDFPQAWAE |
| | | TGGMGLAVRQAPLIIPLKATSTPVSIKQYPMSQEARLGIKPHIQRLLD |
| | | QGILVPCQSPWNTPLLPVKKPGTNDYRPVQDLREVNKRVEDIHPTVP |
| | | NPYNLLSGLPPSHQWYTVLDLKDAFFCLRLHPTSQPLFAFEWRDPE |
| | | MGISGQLTWTRLPQGFKNSPTLFNEALHRDLADFRIQHPDLILLQYV |
| | | DDLLLAATSELDCQQGTRALLQTLGNLGYRASAKKAQICQKQVKY |
| | | LGYLLKEGQRWLTEARKETVMGQPTPKTPRQLREFLGKAGFCRLFIP |
| | | GFAEMAAPLYPLTKPGTLFNWGPDQQKAYQEIKQALLTAPALGLPD |
| | | LTKPFELFVDEKQGYAKGVLTQKLGPWRRPVAYLSKKLDPVAAGW |
| | | PPCLRMVAAIAVLTKDAGKLTMGQPLVILAPHAVEALVKQPPDRWL |
| | | SNARMTHYQALLLDTDRVQFGPVVALNPATLLPLPEEGLQHNCLDI |
| | | LAEAHGTRPDLTDQPLPDADHTWYTDGSSLLQEGQRKAGAAVTTE |
| | | TEVIWAKALPAGTSAQRAELIALTQALKMAEGKKLNVYTDSRYAFA |
| | | TAHIHGEIYRRRGWLTSEGKEIKNKDEILALLKALFLPKRLSIIHCPGH |
| | | QKGHSAEARGNRMADQAARKAAITETPDTSTLLIENSSPSGGSKRTA |
| | | DGSEFESPKKKRKVGSGPAAKRVKLD |
| 7547 | -N-terminal bpSV40NLS | MKRTADGSEFESPKKKRKV |
| 7593 | -CAS9 (R221K N394K | DKKYSIGLDIGTNSVGWAVITDEYKVPSKKFKVLGNTDRHSIKKNLI |
| | H840A) | GALLFDSGETAEATRLKRTARRRYTRRKNRICYLQEIFSNEMAKVD |
| | | DSFFHRLEESFLVEEDKKHERHPIFGNIVDEVAYHEKYPTIYHLRKKL |
| | | VDSTDKADLRLIYLALAHMIKFRGHFLIEGDLNPDNSDVDKLFIQLV |
| | | QTYNQLFEENPINASGVDAKAILSARLSKSRKLENLIAQLPGEKKNG |
| | | LFGNLIALSLGLTPNFKSNFDLAEDAKLQLSKDTYDDDLDNLLAQIG |
| | | DQYADLFLAAKNLSDAILLSDILRVNTEITKAPLSASMIKRYDEHHQ |
| | | DLTLLKALVRQQLPEKYKEIFFDQSKNGYAGYIDGGASQEEFYKFIK |
| | | PILEKMDGTEELLVKLKREDLLRKQRTFDNGSIPHQIHLGELHAILRR |
| | | QEDFYPFLKDNREKIEKILTFRIPYYVGPLARGNSRFAWMTRKSEETI |
| | | TPWNFEEVVDKGASAQSFIERMTNFDKNLPNEKVLPKHSLLYEYFT |
| | | VYNELTKVKYVTEGMRKPAFLSGEQKKAIVDLLFKTNRKVTVKQL |
| | | KEDYFKKIECFDSVEISGVEDRFNASLGTYHDLLKIIKDKDFLDNEEN |
| | | EDILEDIVLTLTLFEDREMIEERLKTYAHLFDDKVMKQLKRRRYTG |
| | | WGRLSRKLINGIRDKQSGKTILDFLKSDGFANRNFMQLIHDDSLTFK |
| | | EDIQKAQVSGQGDSLHEHIANLAGSPAIKKGILQTVKVVDELVKVM |
| | | GRHKPENIVIEMARENQTTQKGQKNSRERMKRIEEGIKELGSQILKE |
| | | HPVENTQLQNEKLYLYYLQNGRDMYVDQELDINRLSDYDVDAIVP |
| | | QSFLKDDSIDNKVLTRSDKNRGKSDNVPSEEVVKKMKNYWRQLLN |
| | | AKLITQRKFDNLTKAERGGLSELDKAGFIKRQLVETRQITKHVAQIL |
| | | DSRMNTKYDENDKLIREVKVITLKSKLVSDFRKDFQFYKVREINNY |
| | | HHAHDAYLNAVVGTALIKKYPKLESEFVYGDYKVYDVRKMIAKSE |
| | | QEIGKATAKYFFYSNIMNFFKTEITLANGEIRKRPLIETNGETGEIVW |
| | | DKGRDFATVRKVLSMPQVNIVKKTEVQTGGFSKESILPKRNSDKLIA |
| | | RKKDWDPKKYGGFDSPTVAYSVLVVAKVEKGKSKKLKSVKELLGI |
| | | TIMERSSFEKNPIDFLEAKGYKEVKKDLIIKLPKYSLFELENGRKRML |
| | | ASAGELQKGNELALPSKYVNFLYLASHYEKLKGSPEDNEQKQLFVE |
| | | QHKHYLDEIIEQISEFSKRVILADANLDKVLSAYNKHRDKPIREQAEN |
| | | IIHLFTLTNLGAPAAFKYFDTTIDRKRYTSTKEVLDATLIHQSITGLYE |
| | | TRIDLSQLGGD |
| 7594 | -SGGSx2-bpSV40NLS- | SGGSSGGSKRTADGSEFESPKKKRKVSGGSSGGS |
| | SGGSx2 linker | |
| 7564 | -MMLV_RT D200N | TLNIEDEYRLHETSKEPDVSLGSTWLSDFPQAWAETGGMGLAVRQA |
| | T330P L603W T306K | PLIIPLKATSTPVSIKQYPMSQEARLGIKPHIQRLLDQGILVPCQSPWN |
| | W313F | TPLLPVKKPGTNDYRPVQDLREVNKRVEDIHPTVPNPYNLLSGLPPS |
| | | HQWYTVLDLKDAFFCLRLHPTSQPLFAFEWRDPEMGISGQLTWTRL |
| | | PQGFKNSPTLFNEALHRDLADFRIQHPDLILLQYVDDLLLAATSELD |
| | | CQQGTRALLQTLGNLGYRASAKKAQICQKQVKYLGYLLKEGQRWL |
| | | TEARKETVMGQPTPKTPRQLREFLGKAGFCRLFIPGFAEMAAPLYPL |
| | | TKPGTLFNWGPDQQKAYQEIKQALLTAPALGLPDLTKPFELFVDEK |
| | | QGYAKGVLTQKLGPWRRPVAYLSKKLDPVAAGWPPCLRMVAAIA |
| | | VLTKDAGKLTMGQPLVILAPHAVEALVKQPPDRWLSNARMTHYQA |
| | | LLLDTDRVQFGPVVALNPATLLPLPEEGLQHNCLDILAEAHGTRPDL |
| | | TDQPLPDADHTWYTDGSSLLQEGQRKAGAAVTTETEVIWAKALPA |
| | | GTSAQRAELIALTQALKMAEGKKLNVYTDSRYAFATAHIHGEIYRR |
| | | RGWLTSEGKEIKNKDEILALLKALFLPKRLSIIHCPGHQKGHSAEAR |
| | | GNRMADQAARKAAITETPDTSTLLIENSSP |
| 7595 | C-terminal linker-NLS | SGGSKRTADGSEFESPKKKRKV |
| 7596 | C-terminal linker-NLS2 | GSGPAAKRVKLD |

### PEgRNA for Editing of USH2A Gene

[0199] The term “prime editing guide RNA”, or “PEgRNA”, refers to a guide polynucleotide that comprises one or more intended nucleotide edits for incorporation into the target DNA. In some embodiments, the PEgRNA associates with and directs a prime editor to incorporate the one or more intended nucleotide edits into the target gene via prime editing. “Nucleotide edit” or “intended nucleotide edit” refers to a specified deletion of one or more nucleotides at one specific position, insertion of one or more nucleotides at one specific position, substitution of a single nucleotide, or other alterations at one specific position to be incorporated into the sequence of the target gene. Intended nucleotide edit may refer to the edit on the editing template as compared to the sequence on the target strand of the target gene or may refer to the edit encoded by the editing template on the newly synthesized single stranded DNA that replaces the editing target sequence, as compared to the editing target sequence. In some embodiments, a PEgRNA comprises a spacer sequence that is complementary or substantially complementary to a search target sequence on a target strand of the target gene. In some embodiments, the PEgRNA comprises a gRNA core that associates with a DNA binding domain, e.g., a CRISPR-Cas protein domain, of a prime editor. In some embodiments, the PEgRNA further comprises an extended nucleotide sequence comprising one or more intended nucleotide edits compared to the endogenous sequence of the target gene, wherein the extended nucleotide sequence may be referred to as an extension arm.

[0200] In certain embodiments, the extension arm comprises a primer binding site sequence (PBS) that can initiate target-primed DNA synthesis. In some embodiments, the PBS is complementary or substantially complementary to a free 3′ end on the edit strand of the target gene at a nick site generated by the prime editor. In some embodiments, the extension arm further comprises an editing template that comprises one or more intended nucleotide edits to be incorporated in the target gene by prime editing. In some embodiments, the editing template is a template for an RNA-dependent DNA polymerase domain or polypeptide of the prime editor, for example, a reverse transcriptase domain. The reverse transcriptase editing template may also be referred to herein as an RT template, or RTT. In some embodiments, the editing template comprises partial complementarity to an editing target sequence in the target gene, e.g., an USH2A gene. In some embodiments, the editing template comprises substantial or partial complementarity to the editing target sequence except at the position of the intended nucleotide edits to be incorporated into the target gene. An exemplary architecture of a PEgRNA including its components is as demonstrated in FIG. 2.

[0201] In some embodiments, a PEgRNA includes only RNA nucleotides and forms an RNA polynucleotide. In some embodiments, a PEgRNA is a chimeric polynucleotide that includes both RNA and DNA nucleotides. For example, a PEgRNA can include DNA in the spacer sequence, the gRNA core, or the extension arm. In some embodiments, a PEgRNA comprises DNA in the spacer sequence. In some embodiments, the entire spacer sequence of a PEgRNA is a DNA sequence. In some embodiments, the PEgRNA comprises DNA in the gRNA core, for example, in a stem region of the gRNA core. In some embodiments, the PEgRNA comprises DNA in the extension arm, for example, in the editing template. An editing template that comprises a DNA sequence may serve as a DNA synthesis template for a DNA polymerase in a prime editor, for example, a DNA-dependent DNA polymerase. Accordingly, the PEgRNA may be a chimeric polynucleotide that comprises RNA in the spacer, gRNA core, and/or the PBS sequences and DNA in the editing template.

[0202] Components of a PEgRNA may be arranged in a modular fashion. In some embodiments, the spacer and the extension arm comprising a primer binding site sequence (PBS) and an editing template, e.g., a reverse transcriptase template (RTT), can be interchangeably located in the 5′ portion of the PEgRNA, the 3′ portion of the PEgRNA, or in the middle of the gRNA core. In some embodiments, a PEgRNA comprises a PBS and an editing template sequence in 5′ to 3′ order. In some embodiments, the gRNA core of a PEgRNA of this disclosure may be located in between a spacer and an extension arm of the PEgRNA. In some embodiments, the gRNA core of a PEgRNA may be located at the 3′ end of a spacer. In some embodiments, the gRNA core of a PEgRNA may be located at the 5′ end of a spacer. In some embodiments, the gRNA core of a PEgRNA may be located at the 3′ end of an extension arm. In some embodiments, the gRNA core of a PEgRNA may be located at the 5′ end of an extension arm. In some embodiments, the PEgRNA comprises, from 5′ to 3′: a spacer, a gRNA core, and an extension arm. In some embodiments, the PEgRNA comprises, from 5′ to 3′: a spacer, a gRNA core, an editing template. and a PBS. In some embodiments, the PEgRNA comprises, from 5′ to 3′: an extension arm, a spacer, and a gRNA core. In some embodiments, the PEgRNA comprises, from 5′ to 3′: an editing template, a PBS, a spacer, and a gRNA core.

[0203] In some embodiments, a PEgRNA comprises a single polynucleotide molecule that comprises the spacer, the gRNA core, and the extension arm. In some embodiments, a PEgRNA comprises multiple polynucleotide molecules, for example, two polynucleotide molecules. In some embodiments, a PEgRNA comprise a first polynucleotide molecule that comprises the spacer and a portion of the gRNA core, and a second polynucleotide molecule that comprises the rest of the gRNA core and the extension arm. In some embodiments, the gRNA core portion in the first polynucleotide molecule and the gRNA core portion in the second polynucleotide molecule are at least partly complementary to each other. In some embodiments, the PEgRNA may comprise a first polynucleotide comprising the spacer and a first portion of a gRNA core comprising, which may also be referred to as a crRNA. In some embodiments, the PEgRNA comprise a second polynucleotide comprising a second portion of the gRNA core and the extension arm, wherein the second portion of the gRNA core may also be referred to as a trans-activating crRNA, or tracr RNA. In some embodiments, the crRNA portion and the tracr RNA portion of the gRNA core are at least partially complementary to each other. In some embodiments, the partially complementary portions of the crRNA and the tracr RNA form a lower stem, a bulge, and an upper stem, as exemplified in FIG. 3.

[0204] In some embodiments, a spacer sequence comprises a region that has substantial complementarity to a search target sequence on the target strand of a double stranded target DNA, e.g., an USH2A gene. In some embodiments, the spacer sequence of a PEgRNA is identical or substantially identical to a protospacer sequence on the edit strand of the target gene (except that the protospacer sequence comprises thymine and the spacer sequence may comprise uracil). In some embodiments, the spacer sequence is at least about 70%, 75%, 80%, 85%, 90%, 95%, or 100% complementary to a search target sequence in the target gene. In some embodiments, the spacer comprises is substantially complementary to the search target sequence.

[0205] In some embodiments, the length of the spacer varies from about least 10 to about 100 nucleotides. In some embodiments, the spacer is 16 nucleotides, 17 nucleotides, 18 nucleotides, 19 nucleotides, 20 nucleotides, 21 nucleotides, 22 nucleotides, 23 nucleotides, 24 nucleotides, or 25 nucleotides in length. In some embodiments, the spacer is from 15 nucleotides to 30 nucleotides in length, 15 to 25 nucleotides in length, 18 to 22 nucleotides in length, 10 to 20 nucleotides in length, or 20 to 30 nucleotides in length. In some embodiments, the spacer is 17 to 22 nucleotides in length, e.g., about 17, 18, 19, 20, 21, or 22 nucleotides in length. In some embodiments, the spacer is 20 nucleotides in length.

[0206] As used herein in a PEgRNA or a nick guide RNA sequence, or fragments thereof such as a spacer, PBS, or RTT sequence, unless indicated otherwise, it should be appreciated that the letter “T” or “thymine” indicates a nucleobase in a DNA sequence that encodes the PEgRNA or guide RNA sequence, and is intended to refer to a uracil (U) nucleobase of the PEgRNA or guide RNA or any chemically modified uracil nucleobase known in the art, such as 5-methoxyuracil.

[0207] The extension arm of a PEgRNA may comprise a primer binding site (PBS) and an editing template (e.g., an RTT). The extension arm may be partially complementary to the spacer. In some embodiments, the editing template (e.g., RTT) is partially complementary to the spacer. In some embodiments, the editing template (e.g., RTT) and the primer binding site (PBS) are each partially complementary to the spacer.

[0208] An extension arm of a PEgRNA may comprise a primer binding site sequence (PBS, or PBS sequence) that comprises complementarity to, and can hybridize with a free 3′ end of a single stranded DNA in the target gene (e.g., the USH2A gene) generated by nicking with a prime editor at the nick site on the PAM strand. The length of the PBS sequence may vary depending on, e.g., the prime editor components, the search target sequence and other components of the PEgRNA. In some embodiments, the length of the primer binding site (PBS) is about 3 to 19 nucleotides in length. In some embodiments, the PBS is about 3 to 17 nucleotides in length. In some embodiments, the PBS is about 4 to 16 nucleotides, about 6 to 16 nucleotides, about 6 to 18 nucleotides, about 6 to 20 nucleotides, about 8 to 20 nucleotides, about 10 to 20 nucleotides, about 12 to 20 nucleotides, about 14 to 20 nucleotides, about 16 to 20 nucleotides, or about 18 to 20 nucleotides in length. In some embodiments, the PBS is 8 to 17 nucleotides in length. In some embodiments, the PBS is 8 to 16 nucleotides in length. In some embodiments, the PBS is 8 to 15 nucleotides in length. In some embodiments, the PBS is 8 to 14 nucleotides in length. In some embodiments, the PBS is 8 to 13 nucleotides in length. In some embodiments, the PBS is 8 to 12 nucleotides in length. In some embodiments, the PBS is 8 to 11 nucleotides in length. In some embodiments, the PBS is 8 to 10 nucleotides in length. In some embodiments, the PBS is 8 or 9 nucleotides in length. In some embodiments, the PBS is 16 or 17 nucleotides in length. In some embodiments, the PBS is 15 to 17 nucleotides in length. In some embodiments, the PBS is 14 to 17 nucleotides in length. In some embodiments, the PBS is 13 to 17 nucleotides in length. In some embodiments, the PBS is 12 to 17 nucleotides in length. In some embodiments, the PBS is 11 to 17 nucleotides in length. In some embodiments, the PBS is 10 to 17 nucleotides in length. In some embodiments, the PBS is 9 to 17 nucleotides in length. In some embodiments, the PBS is about 7 to 15 nucleotides in length. In some embodiments, the PBS is 6, 7, 8, 9, 10, 11, 12, 13, 14, 15, 16, 17, 18, or 19 nucleotides in length. In some embodiments, the PBS is 8 to 14 nucleotides in length. For example, the PBS can be 8, 9, 10, 11, 12, 13, or 14 nucleotides in length. In some embodiments, the PBS is 11 or 12 nucleotides in length. In some embodiments, the PBS is 11 to 13 nucleotides in length. In some embodiments, the PBS is 11 to 14 nucleotides in length. In some cases, a PBS length of no more than 3 nucleotides less than the PEgRNA spacer is chosen. For example, for PEgRNA spacers that are 16 to 22 nucleotides in length, a PBS length of up to 19 nucleotides, e.g., 3 to 19, 5 to 19, or 7 to 19 nucleotides, may be chosen. In some embodiments, the PBS is 5 to 19 nucleotides in length.

[0209] The PBS may be complementary or substantially complementary to a DNA sequence in the edit strand of the target gene. By annealing with the edit strand at a free hydroxy group, e.g., a free 3′ end generated by prime editor nicking, the PBS may initiate synthesis of a new single stranded DNA encoded by the editing template at the nick site. In some embodiments, the PBS is at least about 70%, 75%, 80%, 85%, 90%, 95%, or 100% complementary to a region of the edit strand of the target gene (e.g., the USH2A gene). In some embodiments, the PBS is perfectly complementary, or 100% complementary, to a region of the edit strand of the target gene (e.g., the USH2A gene).

[0210] An extension arm of a PEgRNA may comprise an editing template that serves as a DNA synthesis template for the DNA polymerase in a prime editor during prime editing.

[0211] The length of an editing template may vary depending on, e.g., the prime editor components, the search target sequence and other components of the PEgRNA. In some embodiments, the editing template serves as a DNA synthesis template for a reverse transcriptase, and the editing template is referred to as a reverse transcription editing template (RTT).

[0212] The editing template (e.g., RTT), in some embodiments, is 2, 3, 4, 5, 6, 7, 8, 9, 10, 11, 12, 13, 14, 15, 16, 17, 18, 19, 20, 21, 22, 23, 24, or 25 nucleotides in length.

[0213] In some embodiments, the RTT is 16, 17, 18, 19, 20, 21, 22, 23, 24, 25, 26, 27, 28, 29, 30, 31, 32, 33, 34, 35, 36, 37, 38, 39, 40, 41, 42, 43, 44, 45, 46, 47, 48, 49, 50, 51, 52, 53, 54, 55, 56, 57, 58, 59, 60, 61, 62, 63, 64, 65, 66, 67, 68, 69, 70, 71, 72, 73, 74, 75, 76, 77, 78, 79, or 80 nucleotides in length. In some embodiments, the RTT is 10 to 110 nucleotides in length. In some embodiments, the RTT is 10 to 109, 10 to 108, 10 to 107, 10 to 106, 10 to 105, 10 to 104, 10 to 103, 10 to 102, or 10 to 101 nucleotides in length. In some embodiments, the RTT is from 14 to 34 nucleotides in length. In some embodiments, the RTT is from 18 to 22 nucleotides in length. In some embodiments, the RTT is at least 8 and no more than 50 nucleotides in length. In some embodiments, the RTT is at least 8 and no more than 25 nucleotides in length. In some embodiments, the RTT is about 10 to about 20 nucleotides in length. In some embodiments, the RTT is about 11, 12, 13, 14, 15, 16, 17, 18, or 19 nucleotides in length. In some embodiments, the RTT is 11 to 17 nucleotides in length. In some embodiments, the RTT is 12 to 17 nucleotides in length. In some embodiments, the RTT is 12 to 16 nucleotides in length. In some embodiments, the RTT is 13 to 17 nucleotides in length. In some embodiments, the RTT is 11, 12, 13, 14, 15, 16, or 17 nucleotides in length. In some embodiments the RTT is 12 nucleotides in length. In some embodiments the RTT is 16 nucleotides in length. In some embodiments the RTT is 17 nucleotides in length.

[0214] In some embodiments, the RTT has a length of 44 nucleotides or less. In some embodiments, the RTT has a length of 34 nucleotides or less. In some embodiments, the RTT has a length of 22 nucleotides or less.

[0215] In some embodiments, the editing template (e.g., RTT) sequence is about 70%, 75%, 80%, 85%, 90%, 95%, or 99% complementary to the editing target sequence on the edit strand of the target gene. In some embodiments, the editing template sequence (e.g., RTT) is substantially complementary to the editing target sequence. In some embodiments, the editing template sequence (e.g., RTT) is complementary to the editing target sequence except at positions of the intended nucleotide edits to be incorporated int the target gene. In some embodiments, the editing template comprises a nucleotide sequence comprising about 85% to about 95% complementarity to an editing target sequence in the edit strand in the target gene (e.g., the USH2A gene). In some embodiments, the editing template comprises about 86%, about 87%, about 88%, about 89%, about 90%, about 91%, about 92%, about 93%, about 94%, about 95%, about 96%, about 97%, about 98%, or about 99% complementarity to an editing target sequence in the edit strand of the target gene (e.g., the USH2A gene).

[0216] An intended nucleotide edit in an editing template of a PEgRNA may comprise various types of alterations as compared to the target gene sequence. In some embodiments, the nucleotide edit is a single nucleotide substitution as compared to the target gene sequence. In some embodiments, the nucleotide edit is a deletion as compared to the target gene sequence. In some embodiments, the nucleotide edit is an insertion as compared to the target gene sequence. In some embodiments, the editing template comprises one to ten intended nucleotide edits as compared to the target gene sequence. In some embodiments, the editing template comprises one or more intended nucleotide edits as compared to the target gene sequence. In some embodiments, the editing template comprises two or more intended nucleotide edits as compared to the target gene sequence. In some embodiments, the editing template comprises three or more intended nucleotide edits as compared to the target gene sequence. In some embodiments, the editing template comprises four or more, five or more, or six or more intended nucleotide edits as compared to the target gene sequence. In some embodiments, the editing template comprises two single nucleotide substitutions, insertions, deletions, or any combination thereof, as compared to the target gene sequence. In some embodiments, the editing template comprises three single nucleotide substitutions, insertions, deletions, or any combination thereof, as compared to the target gene sequence. In some embodiments, the editing template comprises four, five, or six single nucleotide substitutions, insertions, deletions, or any combination thereof, as compared to the target gene sequence. In some embodiments, a nucleotide substitution comprises an adenine (A)-to-thymine (T) substitution. In some embodiments, a nucleotide substitution comprises an A-to-guanine (G) substitution. In some embodiments, a nucleotide substitution comprises an A-to-cytosine (C) substitution. In some embodiments, a nucleotide substitution comprises a T-A substitution. In some embodiments, a nucleotide substitution comprises a T-G substitution. In some embodiments, a nucleotide substitution comprises a T-C substitution. In some embodiments, a nucleotide substitution comprises a G-to-A substitution. In some embodiments, a nucleotide substitution comprises a G-to-T substitution. In some embodiments, a nucleotide substitution comprises a G-to-C substitution. In some embodiments, a nucleotide substitution comprises a C-to-A substitution. In some embodiments, a nucleotide substitution comprises a C-to-T substitution. In some embodiments, a nucleotide substitution comprises a C-to-G substitution.

[0217] In some embodiments, a nucleotide insertion is at least 1, at least 2, at least 3, at least 4, at least 5 nucleotides, at least 6 nucleotides, at least 7 nucleotides, at least 8 nucleotides, at least 9 nucleotides, at least 10 nucleotides, at least 11 nucleotides, at least 12 nucleotides, at least 13 nucleotides, at least 14 nucleotides, at least 15 nucleotides, at least 16 nucleotides, at least 17 nucleotides, at least 18 nucleotides, at least 19 nucleotides, or at least 20 nucleotides in length. In some embodiments, a nucleotide insertion is from 1 to 2 nucleotides, from 1 to 3 nucleotides, from 1 to 4 nucleotides, from 1 to 5 nucleotides, form 2 to 5 nucleotides, from 3 to 5 nucleotides, from 3 to 6 nucleotides, from 3 to 8 nucleotides, from 4 to 9 nucleotides, from 5 to 10 nucleotides, from 6 to 11 nucleotides, from 7 to 12 nucleotides, from 8 to 13 nucleotides, from 9 to 14 nucleotides, from 10 to 15 nucleotides, from 11 to 16 nucleotides, from 12 to 17 nucleotides, from 13 to 18 nucleotides, from 14 to 19 nucleotides, from 15 to 20 nucleotides in length. In some embodiments, a nucleotide insertion is a single nucleotide insertion. In some embodiments, a nucleotide insertion comprises insertion of two nucleotides.

[0218] The editing template of a PEgRNA may comprise one or more intended nucleotide edits, compared to the USH2A gene to be edited. Position of the intended nucleotide edit(s) relevant to other components of the PEgRNA, or to particular nucleotides (e.g., mutations) in the USH2A target gene may vary. In some embodiments, the nucleotide edit is in a region of the PEgRNA corresponding to or homologous to the protospacer sequence. In some embodiments, the nucleotide edit is in a region of the PEgRNA corresponding to a region of the USH2A gene outside of the protospacer sequence.

[0219] By “upstream” and “downstream” it is intended to define relevant positions at least two regions or sequences in a nucleic acid molecule orientated in a 5′-to-3′ direction. For example, a first sequence is upstream of a second sequence in a DNA molecule where the first sequence is positioned 5′ to the second sequence. Accordingly, the second sequence is downstream of the first sequence.

[0220] In some embodiments, the position of a nucleotide edit incorporation in the target gene may be referred to based on the position of the nick site. In some embodiments, position of an intended nucleotide edit is 0, 1, 2, 3, 4, 5, 6, 7, 8, 9, 10, 11, 12, 13, 14, 15, 16, 17, 18, 19, 20, 21, 22, 23, 24, 25, 26, 27, 28, 29, 30, 31, 32, 33, 34, 35, 36, 37, 38, 39, 40, 45, 50, 55, 60, 65, 70, 75, 80, 85, 90, 95, 100, 110, 120, 130, 140, or 150 nucleotides apart from the nick site. In some embodiments, position of an intended nucleotide edit is 0, 1, 2, 3, 4, 5, 6, 7, 8, 9, 10, 11, 12, 13, 14, 15, 16, 17, 18, 19, 20, 21, 22, 23, 24, 25, 26, 27, 28, 29, 30, 31, 32, 33, 34, 35, 36, 37, 38, 39, 40, 45, 50, 55, 60, 65, 70, 75, 80, 85, 90, 95, 100, 110, 120, 130, 140, or 150 nucleotides downstream of the nick site on the PAM strand (or the non-target strand, or the edit strand) of the double stranded target DNA. In some embodiments, position of the intended nucleotide edit in the editing template may be referred to by aligning the editing template with the partially complementary editing target sequence on the edit strand and referring to nucleotide positions on the editing strand where the intended nucleotide edit is incorporated. Accordingly, in some embodiments, a nucleotide edit in an editing template is at a position corresponding to a position about 0, 1, 2, 3, 4, 5, 6, 7, 8, 9, 10, 11, 12, 13, 14, 15, 16, 17, 18, 19, 20, 21, 22, 23, 24, 25, 26, 27, 28, 29, 30, 31, 32, 33, 34, 35, 36, 37, 38, 39, 40, 45, 50, 55, 60, 65, 70, 75, 80, 85, 90, 95, 100, 110, 120, 130, 140, or 150 nucleotides apart from the nick site. In some embodiments, a nucleotide edit in an editing template is at a position corresponding to a position about 0 to 2 nucleotides, 0 to 4 nucleotides, 0 to 6 nucleotides, 0 to 8 nucleotides, 0 to 10 nucleotides, 2 to 4 nucleotides, 2 to 6 nucleotides, 2 to 8 nucleotides, 2 to 10 nucleotides, 2 to 12 nucleotides, 4 to 6 nucleotides, 4 to 8 nucleotides, 4 to 10 nucleotides, 4 to 12 nucleotides, 4 to 14 nucleotides, 6 to 8 nucleotides, 6 to 10 nucleotides, 6 to 12 nucleotides, 6 to 14 nucleotides, 6 to 16 nucleotides, 8 to 10 nucleotides, 8 to 12 nucleotides, 8 to 14 nucleotides, 8 to 16 nucleotides, 8 to 18 nucleotides, 10 to 12 nucleotides, 10 to 14 nucleotides, 10 to 16 nucleotides, 10 to 18 nucleotides, 10 to 20 nucleotides, 12 to 14 nucleotides, 12 to 16 nucleotides, 12 to 18 nucleotides, 12 to 20 nucleotides, 12 to 22 nucleotides, 14 to 16 nucleotides, 14 to 18 nucleotides, 14 to 20 nucleotides, 14 to 22 nucleotides, 14 to 24 nucleotides, 16 to 18 nucleotides, 16 to 20 nucleotides, 16 to 22 nucleotides, 16 to 24 nucleotides, 16 to 26 nucleotides, 18 to 20 nucleotides, 18 to 22 nucleotides, 18 to 24 nucleotides, 18 to 26 nucleotides, 18 to 28 nucleotides, 20 to 22 nucleotides, 20 to 24 nucleotides, 20 to 26 nucleotides, 20 to 28 nucleotides, 20 to 30 nucleotides, 30 to 40 nucleotides, 40 to 50 nucleotides, 50 to 60 nucleotides, 60 to 70 nucleotides, 70 to 80 nucleotides, 80 to 90 nucleotides, 90 to 100 nucleotides, 100 to 110 nucleotides, 110 to 120 nucleotides, 120 to 130 nucleotides, 130 to 140 nucleotides, or 140 to 150 nucleotides apart from the nick site. In some embodiments, when referred to in the context of the PAM strand (or the non-target strand, or the edit strand), a nucleotide edit in an editing template is at a position corresponding to a position about 0 to 2 nucleotides, 0 to 4 nucleotides, 0 to 6 nucleotides, 0 to 8 nucleotides, 0 to 10 nucleotides, 2 to 4 nucleotides, 2 to 6 nucleotides, 2 to 8 nucleotides, 2 to 10 nucleotides, 2 to 12 nucleotides, 4 to 6 nucleotides, 4 to 8 nucleotides, 4 to 10 nucleotides, 4 to 12 nucleotides, 4 to 14 nucleotides, 6 to 8 nucleotides, 6 to 10 nucleotides, 6 to 12 nucleotides, 6 to 14 nucleotides, 6 to 16 nucleotides, 8 to 10 nucleotides, 8 to 12 nucleotides, 8 to 14 nucleotides, 8 to 16 nucleotides, 8 to 18 nucleotides, 10 to 12 nucleotides, 10 to 14 nucleotides, 10 to 16 nucleotides, 10 to 18 nucleotides, 10 to 20 nucleotides, 12 to 14 nucleotides, 12 to 16 nucleotides, 12 to 18 nucleotides, 12 to 20 nucleotides, 12 to 22 nucleotides, 14 to 16 nucleotides, 14 to 18 nucleotides, 14 to 20 nucleotides, 14 to 22 nucleotides, 14 to 24 nucleotides, 16 to 18 nucleotides, 16 to 20 nucleotides, 16 to 22 nucleotides, 16 to 24 nucleotides, 16 to 26 nucleotides, 18 to 20 nucleotides, 18 to 22 nucleotides, 18 to 24 nucleotides, 18 to 26 nucleotides, 18 to 28 nucleotides, 20 to 22 nucleotides, 20 to 24 nucleotides, 20 to 26 nucleotides, 20 to 28 nucleotides, 20 to 30 nucleotides, 30 to 40 nucleotides, 40 to 50 nucleotides, 50 to 60 nucleotides, 60 to 70 nucleotides, 70 to 80 nucleotides, 80 to 90 nucleotides, 90 to 100 nucleotides, 100 to 110 nucleotides, 110 to 120 nucleotides, 120 to 130 nucleotides, 130 to 140 nucleotides, or 140 to 150 nucleotides downstream from the nick site. The relative positions of the intended nucleotide edit(s) and nick site may be referred to by numbers. For example, in some embodiments, the nucleotide immediately downstream of the nick site on a PAM strand (or the non-target strand, or the edit strand) may be referred to as at position 0. The nucleotide immediately upstream of the nick site on the PAM strand (or the non-target strand, or the edit strand) may be referred to as at position −1. The nucleotides downstream of position 0 on the PAM strand may be referred to as at positions +1, +2, +3, +4, . . . +n, and the nucleotides upstream of position −1 on the PAM strand may be referred to as at positions −2, −3, −4, . . . , −n. Accordingly, in some embodiments, the nucleotide in the editing template that corresponds to position 0 when the editing template is aligned with the partially complementary editing target sequence by complementarity may also be referred to as position 0 in the editing template, the nucleotides in the editing template corresponding to the nucleotides at positions +1, +2, +3, +4, . . . , +n on the PAM strand of the double stranded target DNA may also be referred to as at positions +1, +2, +3, +4, . . . , +n in the editing template, and the nucleotides in the editing template corresponding to the nucleotides at positions −1, −2, −3, −4, . . . , −n on the PAM strand on the double stranded target DNA may also be referred to as at positions −1, −2, −3, −4, . . . , −n on the editing template, even though when the PEgRNA is viewed as a standalone nucleic acid, positions +1, +2, +3, +4, . . . , +n are 5′ of position 0 and positions −1, −2, −3, −4, . . . , −n are 3′ of position 0 in the editing template. In some embodiments, an intended nucleotide edit is at position +n of the editing template relative to position 0. Accordingly, the intended nucleotide edit may be incorporated at position +n of the PAM strand of the double stranded target DNA (and subsequently, the target strand of the double stranded target DNA) by prime editing wherein n is an integer no less than 0. The corresponding positions of the intended nucleotide edit incorporated in the target gene may also be referred to based on the nicking position generated by a prime editor based on sequence homology and complementarity. For example, in embodiments, the distance between the nucleotide edit to be incorporated into the USH2A and the nick site (also referred to as the “nick to edit distance”) may be determined by the position of the nick site and the position of the nucleotide(s) corresponding to the intended nucleotide edit(s), for example, by identifying sequence complementarity between the spacer and the search target sequence and sequence complementarity between the editing template and the editing target sequence. In certain embodiments, the position of the nucleotide edit can be in any position downstream of the nick site on the edit strand (or the PAM strand). As used herein, the distance between the nick site and the nucleotide edit, for example, where the nucleotide edit comprises an insertion or deletion, refers to the 5′ most position of the nucleotide edit for a nick that creates a 3′ free end on the edit strand (i.e., the “near position” of the nucleotide edit to the nick site). In some embodiments, the nick-to-edit distance is 2 to 106 nucleotides. In some embodiments, the nick-to-edit distance is 2 to 105, 2 to 104, 2 to 103, 2 to 102, 2 to 101, 2 to 100, 2 to 99, 2 to 98, or 2 to 97 nucleotides. In some embodiments, the nick-to-edit distance is 2 to 90, 2 to 80, 2 to 70, 2 to 60, 2 to 50, 2 to 40, or 2 to 30 nucleotides. In some embodiments, the nick-to-edit distance is 2 to 25, 2 to 20, 2 to 15, or 2 to 10 nucleotides. In some embodiments, the nick-to-edit distance is 2, 3, 4, 5, 6, or 7 nucleotides in length.

[0221] The RTT length and the nick-to-edit distance relate to the length of the portion of the RTT that is upstream of (i.e., 5′ to) the 5′-most edit in the RTT and is complementary to the edit strand. In some embodiments, the editing template comprises at least 4 contiguous nucleotides of complementarity with the edit strand wherein the at least 4 nucleotides contiguous are located upstream of the 5′ most edit in the editing template. In some embodiments, the editing template comprises at least 5, 6, 7, 8, 9, 10, 11, 12, 13, 14, 15, 16, 17, 18, 19, or more contiguous nucleotides of complementarity with the edit strand wherein the at least 5, 6, 7, 8, 9, 10, 11, 12, 13, 14, 15, 16, 17, 18, 19, or more contiguous nucleotides are located upstream of the 5′ most edit in the editing template. In some embodiments, the editing template comprises 20-25, 25-30, 30-35, 35-40, 45-45, or 45-50 contiguous nucleotides of complementarity with the edit strand wherein the 20-25, 25-30, 30-35, 35-40, 45-45, or 45-50 or more contiguous nucleotides are located upstream of the 5′ most edit in the editing template. In some embodiments, the editing template comprises 9-14 contiguous nucleotides of complementarity with the edit strand wherein the 9-14 contiguous nucleotides are located upstream of the 5′ most edit in the editing template. In some embodiments, the editing template comprises 6-10 contiguous nucleotides of complementarity with the edit strand wherein the 6-10 contiguous nucleotides are located upstream of the 5′ most edit in the editing template. In some embodiments, the editing template comprises 10 contiguous nucleotides of complementarity with the edit strand wherein the 10 contiguous nucleotides are located upstream of the 5′ most edit in the editing template. In some embodiments, the editing template comprises 9 contiguous nucleotides of complementarity with the edit strand wherein the 9 contiguous nucleotides are located upstream of the 5′ most edit in the editing template.

[0222] When referred to within the PEgRNA, positions of the one or more intended nucleotide edits may be referred to relevant to components of the PEgRNA. For example, an intended nucleotide edit may be 5′ or 3′ to the PBS. In some embodiments, a PEgRNA comprises the structure, from 5′ to 3′: a spacer, a gRNA core, an editing template, and a PBS. In some embodiments, the intended nucleotide edit is 0, 1, 2, 3, 4, 5, 6, 7, 8, 9, 10, 11, 12, 13, 14, 15, 16, 17, 18, 19, 20, 21, 22, 23, 24, 25, 26, 27, 28, 29, 30, 31, 32, 33, 34, 35, 36, 37, 38, 39, or 40 nucleotides upstream to the 5′ most nucleotide of the PBS. In some embodiments, the intended nucleotide edit is 0 to 2 nucleotides, 0 to 4 nucleotides, 0 to 6 nucleotides, 0 to 8 nucleotides, 0 to 10 nucleotides, 2 to 4 nucleotides, 2 to 6 nucleotides, 2 to 8 nucleotides, 2 to 10 nucleotides, 2 to 12 nucleotides, 4 to 6 nucleotides, 4 to 8 nucleotides, 4 to 10 nucleotides, 4 to 12 nucleotides, 4 to 14 nucleotides, 6 to 8 nucleotides, 6 to 10 nucleotides, 6 to 12 nucleotides, 6 to 14 nucleotides, 6 to 16 nucleotides, 8 to 10 nucleotides, 8 to 12 nucleotides, 8 to 14 nucleotides, 8 to 16 nucleotides, 8 to 18 nucleotides, 10 to 12 nucleotides, 10 to 14 nucleotides, 10 to 16 nucleotides, 10 to 18 nucleotides, 10 to 20 nucleotides, 12 to 14 nucleotides, 12 to 16 nucleotides, 12 to 18 nucleotides, 12 to 20 nucleotides, 12 to 22 nucleotides, 14 to 16 nucleotides, 14 to 18 nucleotides, 14 to 20 nucleotides, 14 to 22 nucleotides, 14 to 24 nucleotides, 16 to 18 nucleotides, 16 to 20 nucleotides, 16 to 22 nucleotides, 16 to 24 nucleotides, 16 to 26 nucleotides, 18 to 20 nucleotides, 18 to 22 nucleotides, 18 to 24 nucleotides, 18 to 26 nucleotides, 18 to 28 nucleotides, 20 to 22 nucleotides, 20 to 24 nucleotides, 20 to 26 nucleotides, 20 to 28 nucleotides, or 20 to 30 nucleotides upstream to the 5′ most nucleotide of the PBS.

[0223] The corresponding positions of the intended nucleotide edit incorporated in the target gene may also be referred to based on the nicking position generated by a prime editor based on sequence homology and complementarity. For example, in embodiments, the distance between the nucleotide edit to be incorporated into the target USH2A gene and the and the nick site (also referred to as the “nick to edit distance”) may be determined by the position of the nick site and the position of the nucleotide(s) corresponding to the intended nucleotide edit(s), for example, by identifying sequence complementarity between the spacer and the search target sequence and sequence complementarity between the editing template and the editing target sequence. In certain embodiments, the position of the nucleotide edit can be in any position downstream of the nick site on the edit strand (or the PAM strand) generated by the prime editor, such that the distance between the nick site and the intended nucleotide edit is 0, 1, 2, 3, 4, 5, 6, 7, 8, 9, 10, 11, 12, 13, 14, 15, 16, 17, 18, 19, 20, 21, 22, 23, 24, 25, 26, 27, 28, 29, or 30 nucleotides in length. In some embodiments, the position of the nucleotide edit is 0 base pair from the nick site on the edit strand, that is, the editing position is at the same position as the nick site. As used herein, the distance between the nick site and the nucleotide edit, for example, where the nucleotide edit comprises an insertion or deletion, refers to the 5′ most position of the nucleotide edit for a nick that creates a 3′ free end on the edit strand (i.e., the “near position” of the nucleotide edit to the nick site). Similarly, as used herein, the distance between the nick site and a PAM position edit, for example, where the nucleotide edit comprises an insertion, deletion, or substitution of two or more contiguous nucleotides, refers to the 5′ most position of the nucleotide edit and the 5′ most position of the PAM sequence.

[0224] In some embodiments, the editing template can comprise a second edit relative to a target sequence. The second edit can be designed to mutate or otherwise silence a PAM sequence such that a corresponding nucleic acid guided nuclease or CRISPR nuclease is no longer able to cleave the target sequence (such edits referred to as “PAM silencing edits).

[0225] Without wishing to be bound by any particular theory. PAM silencing edits may prevent the Cas, e.g., Cas9, nickase, from re-nicking the edit strand before the edit is incorporated in the target strand, therefore improving prime editing efficiency. In some embodiments, a PAM silencing edit is a synonymous edit that does not alter the amino acid sequence encoded by the target gene after incorporation of the edit.

[0226] In some embodiments, the length of the editing template is at least 2, 3, 4, 5, 6, 7, 8, 9, 10, 11, 12, 13, 14, 15, 16, 17, 18, 19, 20, 21, 22, 23, 24, 25, 26, 27, 28, 29, 30, 31, 32, 33, 34, 35, 36, 37, 38, 39, 40, 41, 42, 43, 44, 45, 46, 47, 48, 49, 50, 51, 52, 53, 54, 55, 56, 57, 58, 59, 60, 61, 62, 63, 64, 65, 66, 67, 68, 69, 70, 71, 72, 73, 74, 75, 76, 77, 78, 79, or 80 nucleotides longer than the nick to edit distance. In some embodiments, for example, the nick to edit distance is 8 nucleotides, and the editing template is 10 to 15, 10 to 20, 10 to 25, 10 to 30, 10 to 35, 10 to 40, 10 to 45, 10 to 50, 10 to 55, 10 to 60, 10 to 65, 10 to 70, 10 to 75, or 10 to 80 nucleotides in length. In some embodiments, the nick to edit distance is 22 nucleotides, and the editing template is 24 to 28, 24 to 30, 24 to 32, 24 to 34, 24 to 36, 24 to 37, 24 to 38, 24 to 40, 24 to 45, 24 to 50, 24 to 55, 24 to 60, 24 to 65, 24 to 70, 24 to 75, 24 to 80, 24 to 85, 24 to 90, 24 to 95, 24 to 100, 24 to 105, 24 to 100, 24 to 105, or 24 to 110 nucleotides in length.

[0227] In some embodiments, the editing template comprises an adenine at the first nucleobase position (e.g., for a PEgRNA following 5′-spacer-gRNA core-RTT-PBS-3′ orientation, the 5′ most nucleobase is the “first base”). In some embodiments, the editing template comprises a guanine at the first nucleobase position (e.g., for a PEgRNA following 5′-spacer-gRNA core-RTT-PBS-3′ orientation, the 5′ most nucleobase is the “first base”). In sonic embodiments, the editing template comprises an uracil at the first nucleobase position (e.g., for a PEgR_NA follow ing 5′-spacer-gRNA core-RTT-PBS-3′ orientation, the 5′ most nucleobase is the “first base”). In some embodiments, the editing template comprises a cytosine at the first nucleobase position (e.g., for a PEgRNA following 5′-spacer-gRNA core-RTT-PBS-3′ orientation, the 5′ most nucleobase is the “-first base”). In some embodiments, the editing template does not comprise a cytosine at the first nucleobase position (e.g., for a PEgRNA following 5′-spacer-gRNA core-RTT-PBS-3′ orientation, the 5′ most nucleobase is the “first base”).

[0228] The editing template of a PEgRNA may encode a new single stranded DNA (e.g., by reverse transcription) to replace an editing target sequence in the target gene. In some embodiments, the editing target sequence in the edit strand of the target gene is replaced by the newly synthesized strand, and the nucleotide edit(s) are incorporated in the region of the target gene. In some embodiments, the target gene is an USH2A gene. In some embodiments, the editing template of the PEgRNA encodes a newly synthesized single stranded DNA that comprises a wild type USH2A gene sequence. In some embodiments, the newly synthesized DNA strand replaces the editing target sequence in the target USH2A gene, wherein the editing target sequence (or the endogenous sequence complementary to the editing target sequence on the target strand of the USH2A gene) comprises a mutation or a nucleotide alteration compared to a reference gene, e.g., a wild type USH2A gene. In some embodiments, the mutation is associated with nsRP. In some embodiments, the mutation is associated with Usher syndrome type 2. In some embodiments, the newly synthesized DNA strand replaces the editing target sequence in a target USH2A gene.

[0229] In some embodiments, the editing target sequence comprises a mutation in exon 1, exon 2, exon 3, exon 4, exon 5, exon 6, exon 7, exon 8, exon 9, exon 10, exon 11, exon 12, exon 13, exon 14, exon 15, exon 16, exon 17, exon 18, exon 19, exon 20, exon 21, exon 22, exon 23, exon 24, exon 25, exon 26, exon 27, exon 28. exon 29, exon 30, exon 31, exon 32, exon 33, exon 34, exon 35, exon 36, exon 37, exon 38, exon 39, exon 40, exon 41, exon 42, exon 43, exon 44, exon 45, exon 46, exon 47, exon 48, exon 49, exon 50, exon 51, exon 52, exon 53, exon 54, exon 55, exon 56, exon 57. exon 58. exon 59, exon 60, exon 61, exon 62, exon 63, exon 64, exon 65, exon 66, exon 67, exon 68, exon 69, exon 70, exon 71, or exon 72 of the USH2A gene as compared to a wild type USH2A gene. In some embodiments, the editing target sequence comprises a mutation in exon 1, exon 2, exon 3, exon 4, exon 5, exon 6, exon 7, exon 8, exon 9, exon 10, exon 11, exon 12, exon 13, exon 14, exon 15, exon 16, exon 17, exon 18, exon 19, exon 20, or exon 21 of the USH2A gene as compared to a wild type USH2A gene. In some embodiments, the editing target sequence comprises a mutation at a splice site (i.e., an intron/exon junction) of the USH2A gene as compared to a wild type USH2A gene. In some embodiments, the editing target sequence comprises a mutation in an intron of the USH2A gene as compared to a wild type USH2A gene.

[0230] In some embodiments, the editing template comprises one or more intended nucleotide edits compared to the sequence on the target strand of the USH2A gene that is complementary to the editing target sequence. In some embodiments, the editing template encodes a single stranded DNA that comprises one or more intended nucleotide edits compared to the editing target sequence. In some embodiments, the single stranded DNA replaces the editing target sequence by prime editing, thereby incorporating the one or more intended nucleotide edits. In some embodiments, incorporation of the one or more intended nucleotide edits corrects the mutation in the editing target sequence to wild type nucleotides at corresponding positions in the USH2A gene. As used herein, “correcting” a mutation means restoring a wild type sequence at the place of the mutation in the double stranded target DNA, e.g. target gene, by prime editing. In some embodiments, the editing template comprises a wild type USH2A gene sequence.

[0231] In some embodiments, incorporation of the one or more intended nucleotide edits does not correct the mutation in the editing target sequence to wild type sequence, but allows for expression of a functional usherin protein encoded by the USH2A gene. For example, in some embodiments, incorporation of the one or more intended nucleotide edits results in one or more codons that are different from a wild type codon but encode one or more amino acids same as the wild type usherin protein. In some embodiments, incorporation of the one or more intended nucleotide edits results in one or more codons that encode one or more amino acids different from the wild type usherin protein but allows for expression of a functional usherin protein.

[0232] In some embodiments, the editing template comprises one or more intended nucleotide edits compared to the sequence on the target strand of the target USH2A gene that is complementary to the editing target sequence, wherein the one or more intended nucleotide edits is a single nucleotide substitution, polynucleotide substitution, nucleotide insertion, or nucleotide deletion. In some embodiments, the intended nucleotide edit in the editing template comprises a single nucleotide substitution, polynucleotide substitution, nucleotide insertion, or nucleotide deletion compared to the sequence on the target strand of the target USH2A gene that is complementary to the editing target at a position corresponding to a mutation in target gene, wherein the editing target sequence is on the sense strand of the target gene. In some embodiments, the intended nucleotide edit in the editing template comprises a single nucleotide substitution, polynucleotide substitution, nucleotide insertion, or nucleotide deletion compared to the sequence on the target strand of the target gene that is complementary to the editing target at a position corresponding to a mutation in target gene, wherein the editing target sequence is on the antisense strand of the target USH2A gene.

[0233] A guide RNA core (also referred to herein as the gRNA core, gRNA scaffold, or gRNA backbone sequence) of a PEgRNA may contain a polynucleotide sequence that binds to a DNA binding domain (e.g., Cas9) of a prime editor. The gRNA core may interact with a prime editor as described herein, for example, by association with a DNA binding domain, such as a DNA nickase of the prime editor.

[0234] One of skill in the art will recognize that different prime editors having different DNA binding domains from different DNA binding proteins may require different gRNA core sequences specific to the DNA binding protein. In some embodiments, the gRNA core is capable of binding to a Cas9-based prime editor. In some embodiments, the gRNA core is capable of binding to a CpfI-based prime editor. In some embodiments, the gRNA core is capable of binding to a Cas12b-based prime editor.

[0235] In some embodiments, the gRNA core comprises regions and secondary structures involved in binding with specific CRISPR Cas proteins. For example, in a Cas9 based prime editing system, the gRNA core of a PEgRNA may comprise one or more regions of a base paired “lower stem” adjacent to the spacer sequence and a base paired “tipper stem” following the lower stem, where the lower stem and upper stem may be connected by a “bulge” comprising unpaired RNAs. The gRNA core may further comprise a “nexus” distal from the spacer sequence, followed by a hairpin structure e.g., at the 3′ end, as exemplified in FIG. 3. In some embodiments, the gRNA core comprises modified nucleotides as compared to a wild type gRNA core in the lower stem, upper stem, and/or the hairpin. For example, nucleotides in the lower stem, upper stem, an/or the hairpin regions may be modified, deleted, or replaced. In some embodiments, RNA nucleotides in the lower stem, upper stem, an/or the hairpin regions may be replaced with one or more DNA sequences. In some embodiments, the gRNA core comprises unmodified or wild type RNA sequences in the nexus and/or the bulge regions. In some embodiments, the gRNA core does not include long stretches of A-T pairs, for example, a GUUUU-AAAAC pairing element. In some embodiments, a prime editing system comprises a prime editor and a PEgRNA, wherein the prime editor comprises a SpCas9 nickase variant thereof, and the gRNA core of the PEgRNA comprises the sequence:
[0236] GUUUUAGAGCUAGAAAUAGCAAGUIJAAAAUAAOOCLUAUCCGIAJCAACUUGAAAAAG UGGCACCGAOUCGGUGC (SEQ ID NO: 7544);
[0237] GUUUGAGCACUAGAAAUAGCAAGUUUAAAUAAGGCUAGUCCGUUAUCAACUUGA AAAAGUGGGACCCGAGUCCGGUCC (SEQ ID NO: 7545), or
[0238] GUUUAAGAGCUAUGCUGGAACACCAUAGCAAGUUUAAAUAAGGCUAGUCCGUUAUCAA CUUGAAAAACGUGGCACCGACGUCGGUCGC (SEQ ID NO: 7546). In some embodiments, the gRNA core comprises the sequence GUUUUAGAGCUAGAAAUACCAAGUUAAAAUAAGGCUAGUCCGUUAUCAACUUGAAAAAG UGGICACCGAGUCGGUGC (SEQ ID NO: 7544). Any gRNA core sequences known in the art are also contemplated in the prime editing; compositions described herein.

[0239] A PEgRNA may also comprise optional modifiers, e.g., 3′ end modifier region and/or an 5′ end modifier region. In some embodiments, a PEgRNA comprises at least one nucleotide that is not part of a spacer, a gRNA core, or an extension arm. The optional sequence modifiers could be positioned within or between any of the other regions shown, and not limited to being located at the 3′ and 5′ ends. In certain embodiments, the PEgRNA comprises secondary RNA structure, such as, but not limited to, aptamers, hairpins, stem/loops, toeloops, and/or RNA-binding protein recruitment domains (e.g., the MS2 aptamer which recruits and binds to the MS2cp protein). In some embodiments, a PEgRNA comprises a short stretch of uracil at the 5′ end or the 3′ end. For example, in some embodiments, a PEgRNA comprising a 3′ extension arm comprises a “UUU” sequence at the 3′ end of the extension arm. In some embodiments, a PEgRNA comprises a toeloop sequence at the 3′ end. In some embodiments, the PEgRNA comprises a 3′ extension arm and a toeloop sequence at the 3′ end of the extension arm. In some embodiments, the PEgRNA comprises a 5′ extension arm and a toeloop sequence at the 5′ end of the extension arm. In some embodiments, the PEgRNA comprises a toeloop element having the sequence 5′-GAAANNNNN-3′, wherein N is any nucleobase. In some embodiments, the secondary RNA structure is positioned within the spacer. In some embodiments, the secondary structure is positioned within the extension arm. In some embodiments, the secondary structure is positioned within the gRNA core. In some embodiments, the secondary structure is positioned between the spacer and the gRNA core, between the gRNA core and the extension arm, or between the spacer and the extension arm. In some embodiments, the secondary structure is positioned between the PBS and the editing template. In some embodiments the secondary structure is positioned at the 3′ end or at the 5′ end of the PEgRNA. In some embodiments, the PEgRNA comprises a transcriptional termination signal at the 3′ end of the PEgRNA. In addition to secondary RNA structures, the PEgRNA may comprise a chemical linker or a poly(N) linker or tail, where “N” can be any nucleobase. In some embodiments, the chemical linker may function to prevent reverse transcription of the gRNA core.

[0240] In some embodiments, a prime editing system or composition further comprises a nick guide polynucleotide, such as a nick guide RNA (ngRNA). In some embodiments, a ngRNA comprises a spacer (referred to as a ngRNA spacer or ng spacer) and a gRNA core, wherein the spacer of the ngRNA comprises a region of complementarity to the edit strand, and wherein the gRNA core can interact with a Cas, e.g., Cas9, of a prime editor. Without wishing to be bound by any particular theory, an ngRNA may bind to the edit strand and direct the Cas nickase to generate a nick on the non-edit strand (or target strand). In some embodiments, the nick on the non-edit strand directs endogenous DNA repair machinery to use the edit strand as a template for repair of the non-edit strand, which may increase efficiency of prime editing. In some embodiments, the non-edit strand is nicked by a prime editor localized to the non-edit strand by the ngRNA. Accordingly, also provided herein are PEgRNA systems comprising at least one PEgRNA and at least one ngRNA.

[0241] A prime editing system comprising a PEgRNA (or one or more polynucleotide encoding the PEgRNA) and a prime editor protein (or one or more polynucleotides encoding the prime editor), may be referred to as a PE2 prime editing system and the corresponding editing approach referred to as PE2 approach or PE2 strategy. A PE2 system does not contain a ngRNA. A prime editing system comprising a PEgRNA (or one or more polynucleotide encoding the PEgRNA), a prime editor protein (or one or more polynucleotides encoding the prime editor), and a ngRNA (or one or more polynucleotides encoding the ngRNA) may be referred to as a “PE3” prime editing system. In some embodiments, an ngRNA spacer sequence is complementary to a portion of the edit strand that includes the intended nucleotide edit, and may hybridize with the edit strand only after the edit has been incorporated on the edit strand. Such ngRNA may be referred to a “PE3b” ngRNA, and the prime editing system a PE3b prime editing system.

[0242] In some embodiments, a PEgRNA or a nick guide RNA (ngRNA) can be chemically synthesized, or can be assembled or cloned and transcribed from a DNA sequence, e.g., a plasmid DNA sequence, or by any RNA oligonucleotide synthesis method known in the art. In some embodiments, a DNA sequence that encodes a PEgRNA (or ngRNA) can be designed to append one or more nucleotides at the 5′ end or the 3′ end of the PEgRNA (or nick guide RNA) encoding sequence to enhance PEgRNA transcription. For example, in some embodiments, a DNA sequence that encodes a PEgRNA (or nick guide RNA) (or an ngRNA) can be designed to append a nucleotide G at the 5′ end. Accordingly, in some embodiments, the PEgRNA (or nick guide RNA) can comprise an appended nucleotide G at the 5′ end. In some embodiments, a DNA sequence that encodes a PEgRNA (or nick guide RNA) can be designed to append a sequence that enhances transcription, e.g., a Kozak sequence, at the 5′ end. In some embodiments, a DNA sequence that encodes a PEgRNA (or nick guide RNA) can be designed to append the sequence CACC or CCACC at the 5′ end. Accordingly, in some embodiments, the PEgRNA (or nick guide RNA) can comprise an appended sequence CACC or CCACC at the 5′ end. In some embodiments, a DNA sequence that encodes a PEgRNA (or nick guide RNA) can be designed to append the sequence TTT, TTTT, TTTTT, TTTTTT, TTTTTTT at the 3′ end. Accordingly, in some embodiments, the PEgRNA (or nick guide RNA) can comprise an appended sequence UUU, UUUU, UUUUU, UUUUUU, or UUUUUUU at the 3′ end.

[0243] In some embodiments, the ng search target sequence is located on the non-target strand, within 10 base pairs to 100 base pairs of an intended nucleotide edit incorporated by the PEgRNA on the edit strand. In some embodiments, the ng target search target sequence is within 10 bp, 20 bp, 30 bp, 40 bp, 50 bp, 60 bp, 70 bp, 80 bp, 90 bp, 91 bp, 92 bp, 93 bp, 94 bp, 95 bp, 96 bp, 97 bp, 98 bp, 99 bp, or 100 bp of an intended nucleotide edit incorporated by the PEgRNA on the edit strand. In some embodiments, the 5′ ends of the ng search target sequence and the PEgRNA search target sequence are within 1, 2, 3, 4, 5, 6, 7, 8, 9, or 10 bp apart from each other. In some embodiments, the 5′ ends of the ng search target sequence and the PEgRNA search target sequence are within 10 bp, 20 bp, 30 bp, 40 bp, 50 bp, 60 bp, 70 bp, 80 bp, 90 bp, 91 bp, 92 bp, 93 bp, 94 bp, 95 bp, 96 bp, 97 bp, 98 bp, 99 bp, or 100 bp apart from each other.

[0244] In some embodiments, an ng spacer sequence is complementary to, and may hybridize with the second search target sequence only after an intended nucleotide edit has been incorporated on the edit strand, by the editing template of a PEgRNA. In some embodiments, such a prime editing system maybe referred to as a “PE3b” prime editing system or composition. In some embodiments, the ngRNA comprises a spacer sequence that matches only the edit strand after incorporation of the nucleotide edits, but not the endogenous target gene sequence on the edit strand. Accordingly, in some embodiments, an intended nucleotide edit is incorporated within the ng search target sequence.

[0245] A ngRNA protospacer may be in close proximity to the PEgRNA spacer or may be upstream or downstream of the PEgRNA spacer. In some embodiments, the distance generated by the PEgRNA nick site and the ngRNA nick site (referred to as the nick-to-nick distance) is about 3 to about 100 nucleotides. In some embodiments, the distance generated by the PEgRNA nick site and the ngRNA nick site (referred to as the nick-to-nick distance) is about 4-90, 4-80, 4-70, 4-60, 4-50, 4-40, 4-30, 4-20, or 4-10 nucleotides. In some embodiments, the distance generated by the PEgRNA nick site and the ngRNA nick site (referred to as the nick-to-nick distance) is about 10-20, 20-30, 30-40, 40-50, 50-60, 60-70, 70-80,80-90, or 90-100 nucleotides. In some embodiments, the nick-to-nick distance is about 4-88 nucleotides. In some embodiments, the nick-to-nick distance is about 4-72 nucleotides. In some embodiments, the nick-to-nick distance is about 4-61 nucleotides. In some embodiments, the nick-to-nick distance is about 61-72 nucleotides. In some embodiments, the nick-to-nick distance is about 61-88 nucleotides. In some embodiments, the nick-to-nick distance is about 72-88 nucleotides. In some embodiments, the nick-to-nick distance is about 4-7 nucleotides. In some embodiments, the nick-to-nick distance is 4, 5, 6. or 7 nucleotides. In some embodiments, the nick-to-nick distance is about 41-96 nucleotides. In some embodiments, the nick-to-nick distance is about 41-82 nucleotides. In some embodiments, the nick-to-nick distance is about 41-44 nucleotides. In some embodiments, the nick-to-nick distance is about 44-82 nucleotides. In some embodiments, the nick-to-nick distance is about 44-96 nucleotides. In some embodiments, the nick-to-nick distance is about 82-96 nucleotides. In some embodiments, the nick-to-nick distance is 41, 44, 82, or 96 nucleotides. In some embodiments, the intended nucleotide edit is incorporated within about 1-10 nucleotides of the position corresponding to the PAM of the ng search target sequence.

[0246] The gRNA core of a PEgRNA or ngRNA can be any gRNA scaffold sequence that is capable of interacting with a Cas protein that recognizes the corresponding PAM of the PEgRNA or ngRNA. In some embodiments, gRNA core of a PEgRNA or a ngRNA comprises a sequence selected from SEQ ID Nos: 7544-7545.

[0247] A PEgRNA and/or an ngRNA of this disclosure, in some embodiments, may include modified nucleotides, e.g., chemically modified DNA or RNA nucleobases, and may include one or more nucleobase analogs (e.g., modifications which might add functionality, such as temperature resilience). In some embodiments, PEgRNAs and/or ngRNAs as described herein may be chemically modified. The phrase “chemical modifications,” as used herein, can include modifications which introduce chemistries which differ from those seen in naturally occurring DNA or RNAs, for example, covalent modifications such as the introduction of modified nucleotides, (e.g., nucleotide analogs, or the inclusion of pendant groups which are not naturally found in DNA or RNA molecules).

[0248] In some embodiments, the PEgRNAs provided in the disclosure may further comprise nucleotides added to the 5′ of the PEgRNAs. In some embodiments, the PEgRNA further comprises 1, 2, or 3 additional nucleotides added to the 5′ end. The additional nucleotides can be guanine, cytosine, adenine, or uracil. In some embodiments, the additional nucleotide at the 5′ end of the PEgRNA is a guanine or cytosine. In some embodiments, the additional nucleotides can be chemically or biologically modified.

[0249] In some embodiments, the PEgRNAs provided in the disclosure may further comprise nucleotides to the 3′ of the PEgRNAs. In some embodiments, the PEgRNA further comprises 1, 2, or 3 additional nucleotides to the 3′ end. The additional nucleotides can be guanine, cytosine, adenine, or uracil. In some embodiments, the additional nucleotides at the 3′ end of the PEgRNA is a polynucleotide comprising at least 1 uracil. In some embodiments, the additional nucleotides can be chemically or biologically modified.

[0250] In some embodiments, a PEgRNA or ngRNA is produced by transcription from a template nucleotide, for example, a template plasmid. In some embodiments, a polynucleotide encoding the PEgRNA or ngRNA is appended with one or more additional nucleotides that improves PEgRNA or ngRNA function or expression, e.g., expression from a plasmid that encodes the PEgRNA or ngRNA. In some embodiments, a polynucleotide encoding a PEgRNA or ngRNA is appended with one or more additional nucleotides at the 5′ end or at the 3′ end. In some embodiments, the polynucleotide encoding the PEgRNA or ngRNA is appended with a guanine at the 5′ end, for example, if the first nucleotide at the 5′ end of the spacer is not a guanine. In some embodiments, a polynucleotide encoding the PEgRNA or ngRNA is appended with nucleotide sequence CACC at the 5′ end. In some embodiments, the polynucleotide encoding the PEgRNA or ngRNA is appended with additional nucleotide sequence TTTTTT, TTTTTTT, TTTTT, or TTTT at the 3′ end. In some embodiments, the PEgRNA or ngRNA comprises the appended nucleotides from the transcription template. In some embodiments, the PEgRNA or ngRNA further comprises one or more nucleotides at the 5′ end or the 3′ end in addition to spacer, PBS, and RTT sequences. in some embodiments, the PEgRNA or ngRNA further comprises a guanine at the 5′ end, for example, when the first nucleotide at the 5′ end of the spacer is not a guanine. In some embodiments, the PEgRNA or ngRNA further comprises nucleotide sequence CACC at the 5′ end. In some embodiments, the PEgRNA or ngRNA further comprises an adenine at the 3′ end, for example, if the last nucleotide at the 3′ end of the PBS is a thymine. In some embodiments, the PEgRNA or ngRNA further comprises nucleotide sequence UUUUUUU, UUUUUU, UUUUU, or UUUU at the 3′ end.

[0251] In some embodiments, the PEgRNAs and/or ngRNAs provided in this disclosure may have undergone a chemical or biological modifications. Modifications may be made at any position within a PEgRNA or ngRNA, and may include modification to a nucleobase or to a phosphate backbone of the PEgRNA or ngRNA. In some embodiments, chemical modifications can be a structure guided modifications. In some embodiments, a chemical modification is at the 5′ end and/or the 3′ end of a PEgRNA. In some embodiments, a chemical modification is at the 5′ end and/or the 3′ end of a ngRNA. In some embodiments, a chemical modification may be within the spacer sequence, the extension arm, the editing template sequence, or the primer binding site of a PEgRNA. In some embodiments, a chemical modification may be within the spacer sequence or the gRNA core of a PEgRNA or a ngRNA. In some embodiments, a chemical modification may be within the 3′ most nucleotides of a PEgRNA or ngRNA. In some embodiments, a chemical modification may be within the 3′ most end of a PEgRNA or ngRNA. In some embodiments, the PEgRNA or ngRNA comprises 1, 2, 3, 4, 5, 6, 7, 8, 9, 10 or more chemically modified nucleotides at the 3′ end. In some embodiments, a PEgRNA or ngRNA comprises 3 contiguous chemically modified nucleotides at the 3′ end. In some embodiments, a chemical modification may be within the 5′ most end of a PEgRNA or ngRNA. In some embodiments, a PEgRNA or ngRNA comprises 1, 2, 3, 4, 5, 6, 7, 8, 9, 10 or more chemically modified nucleotides at the 3′ end. In some embodiments, a PEgRNA or ngRNA comprises 1, 2, 3, 4, 5, 6, 7, 8, 9, 10 or more chemically modified nucleotides at the 5′ end. In some embodiments, a PEgRNA or ngRNA comprises 1, 2, 3, 4, or 5 or more chemically modified nucleotides at the 3′ end. In some embodiments, a PEgRNA or ngRNA comprises 1, 2, 3, 4, or 5 more chemically modified nucleotides at the 5′ end. In some embodiments, a PEgRNA or ngRNA comprises 1, 2, or 3 or more chemically modified nucleotides at the 3′ end. In some embodiments, a PEgRNA or ngRNA comprises 1, 2, or 3 more chemically modified nucleotides at the 5′ end. In some embodiments, a PEgRNA or ngRNA comprises 1, 2, 3, 4, 5, 6, 7, 8, 9, 10 or more contiguous chemically modified nucleotides at the 3′ end. In some embodiments, a PEgRNA or ngRNA comprises 1, 2, 3, 4, 5, 6, 7, 8, 9, 10 or more contiguous chemically modified nucleotides at the 5′ end. In some embodiments, a PEgRNA or ngRNA comprises 1, 2, 3, 4, or 5 contiguous chemically modified nucleotides at the 3′ end. In some embodiments, a PEgRNA or ngRNA comprises 1, 2, 3, 4, or 5 contiguous chemically modified nucleotides at the 5′ end. In some embodiments, a PEgRNA or ngRNA comprises 1, 2, or 3 contiguous chemically modified nucleotides at the 3′ end. In some embodiments, a PEgRNA or ngRNA comprises 1, 2, or 3 contiguous chemically modified nucleotides at the 5′ end. In some embodiments, a PEgRNA or ngRNA comprises 3 contiguous chemically modified nucleotides at the 3′ end. In some embodiments, a PEgRNA or ngRNA comprises 1, 2, 3, 4, 5, or more chemically modified nucleotides near the 3′ end. In some embodiments, a PEgRNA or ngRNA comprises 3 contiguous chemically modified nucleotides at the 3′ end. In some embodiments, a PEgRNA or ngRNA comprises 3 contiguous chemically modified nucleotides at the 5′ end. In some embodiments, a PEgRNA or ngRNA comprises 1, 2, 3, 4, 5, or more chemically modified nucleotides near the 3′ end. In some embodiments, a PEgRNA or ngRNA comprises 1, 2, 3, 4, 5, or more contiguous chemically modified nucleotides near the 3′ end. In some embodiments, a PEgRNA or ngRNA comprises 1, 2, 3, 4, 5, or more chemically modified nucleotides near the 3′ end, where the 3′ most nucleotide is not modified, and the 1, 2, 3, 4, 5, or more chemically modified nucleotides precede the 3′ most nucleotide in a 5′-to-3′ order. In some embodiments, a PEgRNA or ngRNA comprises 1, 2, 3, 4, 5, 6, 7, 8, 9, 10, 11, 12, 13, 14, 15, 16, 17, 18, 19, 20, 21, 22, 23, 24, 25, 26, 27, 28, 29, 30, 31, 32, 33, 34, 35 or more chemically modified nucleotides near the 3′ end, where the 3′ most nucleotide is not modified, and the 1, 2, 3, 4, 5, 6, 7, 8, 9, 10, 11, 12, 13, 14, 15, 16, 17, 18, 19, 20, 21, 22, 23, 24, 25, 26, 27, 28, 29, 30, 31, 32, 33, 34, 35 or more chemically modified nucleotides precede the 3′ most nucleotide in a 5′-to-3′ order.

[0252] In some embodiments, a PEgRNA or ngRNA comprises one or more chemical modified nucleotides in the gRNA core. As exemplified in FIG. 3, the gRNA core of a PEgRNA may comprise one or more regions of a base paired lower stem, a base paired upper stem. where the lower stem and upper stem may be connected by a bulge comprising unpaired RNAs. The gRNA core may further comprise a nexus distal from the spacer sequence. In some embodiments, the gRNA core comprises one or more chemically modified nucleotides in the lower stem, upper stem, and/or the hairpin regions. In some embodiments, all of the nucleotides in the lower stem, upper sten, and/or the hairpin regions are chemically modified.

[0253] A chemical modification to a PEgRNA or ngRNA can comprise a 2′-O-thionocarbamate-protected nucleoside phosphoramidite, a 2′-O-methyl (M), a 2′-O-methyl 3′phosphorothioate (MS), or a 2′-O-methyl 3′thioPACE (MSP), or any combination thereof. In some embodiments, a chemically modified PEgRNA and/or ngRNA can comprise a ′-O-methyl (M) RNA, a 2′-O-methyl 3′phosphorothioate (MS) RNA, a 2′-O-methyl 3′thioPACE (MSP) RNA, a 2′-F RNA, a phosphorothioate bond modification, any other chemical modifications known in the art, or any combination thereof. A chemical modification may also include, for example, the incorporation of non-nucleotide linkages or modified nucleotides into the PEgRNA and/or ngRNA (e.g., modifications to one or both of the 3′ and 5′ ends of a guide RNA molecule). Such modifications can include the addition of bases to an RNA sequence, complexing the RNA with an agent (e.g., a protein or a complementary nucleic acid molecule), and inclusion of elements which change the structure of an RNA molecule (e.g., which form secondary structures).

### Prime Editing Compositions

[0254] Disclosed herein, in some embodiments, are compositions, systems, and methods using a prime editing composition. The term “prime editing composition” or “prime editing system” refers to compositions involved in the method of prime editing as described herein. A prime editing composition may include a prime editor, e.g., a prime editor fusion protein, and a PEgRNA. A prime editing composition may further comprise additional elements, such as second strand nicking ngRNAs. Components of a prime editing composition may be combined to form a complex for prime editing, or may be kept separately, e.g., for administration purposes.

[0255] In some embodiments, a prime editing composition comprises a prime editor fusion protein complexed with a PEgRNA and optionally complexed with a ngRNA. In some embodiments, the prime editing composition comprises a prime editor comprising a DNA binding domain and a DNA polymerase domain associated with each other through a PEgRNA. For example, the prime editing composition may comprise a prime editor comprising a DNA binding domain and a DNA polymerase domain linked to each other by an RNA-protein recruitment aptamer RNA sequence, which is linked to a PEgRNA. In some embodiments, a prime editing composition comprises a PEgRNA and a polynucleotide, a polynucleotide construct, or a vector that encodes a prime editor fusion protein.

[0256] In some embodiments, a prime editing composition comprises a PEgRNA, a ngRNA, and a polynucleotide, a polynucleotide construct, or a vector that encodes a prime editor fusion protein. In some embodiments, a prime editing composition comprises multiple polynucleotides, polynucleotide constructs, or vectors, each of which encodes one or more prime editing composition components. In some embodiments, the PEgRNA of a prime editing composition is associated with the DNA binding domain, e.g., a Cas9 nickase, of the prime editor. In some embodiments, the PEgRNA of a prime editing composition, complexes with the DNA binding domain of a prime editor and directs the prime editor to the target DNA.

[0257] In some embodiments, a prime editing composition comprises one or more polynucleotides that encode prime editor components and/or PEgRNA or ngRNAs. In some embodiments, a prime editing composition comprises a polynucleotide encoding a fusion protein comprising a DNA binding domain and a DNA polymerase domain. In some embodiments, a prime editing composition comprises (i) a polynucleotide encoding a fusion protein comprising a DNA binding domain and a DNA polymerase domain, and (ii) a PEgRNA or a polynucleotide encoding the PEgRNA. In some embodiments, a prime editing composition comprises (i) a polynucleotide encoding a fusion protein comprising a DNA binding domain and a DNA polymerase domain, (ii) a PEgRNA or a polynucleotide encoding the PEgRNA, and (iii) an ngRNA or a polynucleotide encoding the ngRNA. In some embodiments, a prime editing composition comprises (i) a polynucleotide encoding a DNA binding domain of a prime editor, e.g., a Cas9 nickase, (ii) a polynucleotide encoding a DNA polymerase domain of a prime editor, e.g., a reverse transcriptase, and (iii) a PEgRNA or a polynucleotide encoding the PEgRNA. In some embodiments, a prime editing composition comprises (i) a polynucleotide encoding a DNA binding domain of a prime editor, e.g., a Cas9 nickase, (ii) a polynucleotide encoding a DNA polymerase domain of a prime editor, e.g., a reverse transcriptase, (iii) a PEgRNA or a polynucleotide encoding the PEgRNA, and (iv) an ngRNA or a polynucleotide encoding the ngRNA.

[0258] In some embodiments, the polynucleotide encoding the DNA biding domain or the polynucleotide encoding the DNA polymerase domain further encodes an additional polypeptide domain, e.g., an RNA-protein recruitment domain, such as a MS2 coat protein domain. In some embodiments, a prime editing composition comprises (i) a polynucleotide encoding a N-terminal half of a prime editor fusion protein and an intein-N and (ii) a polynucleotide encoding a C-terminal half of a prime editor fusion protein and an intein-C. In some embodiments, a prime editing composition comprises (i) a polynucleotide encoding a N-terminal half of a prime editor fusion protein and an intein-N(ii) a polynucleotide encoding a C-terminal half of a prime editor fusion protein and an intein-C, (iii) a PEgRNA or a polynucleotide encoding the PEgRNA, and/or (iv) an ngRNA or a polynucleotide encoding the ngRNA. In some embodiments, a prime editing composition comprises (i) a polynucleotide encoding a N-terminal portion of a DNA binding domain and an intein-N, (ii) a polynucleotide encoding a C-terminal portion of the DNA binding domain, an intein-C, and a DNA polymerase domain. In some embodiments, the DNA binding domain is a Cas protein domain, e.g., a Cas9 nickase. In some embodiments, the prime editing composition comprises (i) a polynucleotide encoding a N-terminal portion of a DNA binding domain and an intein-N, (ii) a polynucleotide encoding a C-terminal portion of the DNA binding domain, an intein-C, and a DNA polymerase domain, (iii) a PEgRNA or a polynucleotide encoding the PEgRNA, and/or (iv) a ngRNA or a polynucleotide encoding the ngRNA.

[0259] In some embodiments, a prime editing system comprises one or more polynucleotides encoding one or more prime editor polypeptides, wherein activity of the prime editing system may be temporally regulated by controlling the timing in which the vectors are delivered. For example, in some embodiments, a polynucleotide encoding the prime editor and a polynucleotide encoding a PEgRNA may be delivered simultaneously. For example, in some embodiments, a polynucleotide encoding the prime editor and a polynucleotide encoding a PEgRNA may be delivered sequentially.

[0260] In some embodiments, a polynucleotide encoding a component of a prime editing system may further comprise an element that is capable of modifying the intracellular half-life of the polynucleotide and/or modulating translational control. In some embodiments, the polynucleotide is a RNA, for example, an mRNA. In some embodiments, the half-life of the polynucleotide, e.g., the RNA may be increased. In some embodiments, the half-life of the polynucleotide, e.g., the RNA may be decreased. In some embodiments, the element may be capable of increasing the stability of the polynucleotide, e.g., the RNA. In some embodiments, the element may be capable of decreasing the stability of the polynucleotide, e.g., the RNA. In some embodiments, the element may be within the 3′ UTR of the RNA. In some embodiments, the element may include a polyadenylation signal (PA). In some embodiments, the element may include a cap, e.g., an upstream mRNA or PEgRNA end. In some embodiments, the RNA may comprise no PA such that it is subject to quicker degradation in the cell after transcription.

[0261] In some embodiments, the element may include at least one AU-rich element (ARE). The AREs may be bound by ARE binding proteins (ARE-BPs) in a manner that is dependent upon tissue type, cell type, timing, cellular localization, and environment. In some embodiments the destabilizing element may promote RNA decay, affect RNA stability, or activate translation. In some embodiments, the AREs may comprise 50 to 150 nucleotides in length. In some embodiments, the AREs may comprise at least one copy of the sequence AUUUA. In some embodiments, at least one ARE may be added to the 3′ UTR of the RNA. In some embodiments, the element may be a Woodchuck Hepatitis Virus Posttranscriptional Regulatory Element (WPRE). In further embodiments, the element is a modified and/or truncated WPRE sequence that is capable of enhancing expression from the transcript. In some embodiments, the WPRE or equivalent may be added to the 3′ UTR of the RNA. In some embodiments, the element may be selected from other RNA sequence motifs that are enriched in either fast- or slow-decaying transcripts. In some embodiments, the polynucleotide, e.g., a vector, encoding the PE or the PEgRNA may be self-destroyed via cleavage of a target sequence present on the polynucleotide, e.g., a vector. The cleavage may prevent continued transcription of a PE or a PEgRNA.

[0262] Polynucleotides encoding prime editing composition components can be DNA, RNA, or any combination thereof. In some embodiments, a polynucleotide encoding a prime editing composition component is an expression construct. In some embodiments, a polynucleotide encoding a prime editing composition component is a vector. In some embodiments, the vector is a DNA vector. In some embodiments, the vector is a plasmid. In some embodiments, the vector is a virus vector, e.g., a retroviral vector, adenoviral vector, lentiviral vector, herpesvirus vector, or an adeno-associated virus vector (AAV).

[0263] In some embodiments, polynucleotides encoding polypeptide components of a prime editing composition are codon optimized by replacing at least one codon (e.g., about or more than about 1, 2, 3, 4, 5, 10, 15, 20, 25, 50, or more codons) of the native sequence with codons that are more frequently or most frequently used in the genes of that host cell while maintaining the native amino acid sequence. In some embodiments, a polynucleotide encoding a polypeptide component of a prime editing composition are operably linked to one or more expression regulatory elements, for example, a promoter, a 3′ UTR, a 5′ UTR, or any combination thereof. In some embodiments, a polynucleotide encoding a prime editing composition component is a messenger RNA (mRNA). In some embodiments, the mRNA comprises a Cap at the 5′ end and/or a poly A tail at the 3′ end.

[0264] Unless otherwise indicated, references to nucleotide positions in human chromosomes are as set forth in human genome assembly consortium Human build 38 (GRCh38), GenBank accession GCF_000001405.38.

[0265] In some embodiments, the editing target sequence comprises a mutation that is in exon 13 of the USI-12A gene as compared to a wild type USH2A gene. In some embodiments, the editing target sequence comprises a mutation that is located between positions 216246995 and 216247195 of human chromosome 1. In some embodiments, the editing target sequence comprises a mutation that results in a E767 frameshift (E767fs) mutation in the usherin protein encoded by the USH2A gene as compared to a wild type usherin protein as set forth in SEQ ID NO:7598. In some embodiments, the editing target sequence comprises a deletion of nucleotide G at a position corresponding to position 216247095 of human chromosome 1 (c.2299de1G mutation) as compared to a wild type USH2A gene. In some embodiments, the editing target sequence comprises a deletion of nucleotide C at a position corresponding to position 216247095 of human chromosome 1 as compared to a wild type USH2A gene.

[0266] Exemplary combinations of PEgRNA components, e.g., spacer, PBS, and edit template/RTT, as well as combinations of each PEgRNA and corresponding ngRNA(s) are provided in Tables 1-44. Tables 1-44 each contain three columns. The left column is the sequence number. The middle column provides the sequence of the component, labeled with a SEQ ID NO where required by ST.26 standard. Although all the sequences provided in Tables 1-44 are RNA sequences, “T” is used instead of a “U” in the sequences for consistency with the ST.26 standard. The right column contains a description of the sequence. All of the PEgRNAs in Tables 1-19 are designed to correct a c.2299delG mutation in the USH2a gene. However, PEgRNA containing an RTT described with with a dual correction annotation in the right column are designed to also be capable of correcting a c.2276 G->T mutation in the USH2a gene. Similarly, all the PEgRNAs in Tables 20-44 are designed to correct a c.2276 G->T mutation in the USH2a gene, with PEgRNAs containing a dual correction annotated RTT designed to be capable of correcting a c.2276 G->T and/or a c2299delG mutation in the USH2a gene.

[0267] The PEgRNAs exemplified in Tables 1-44 comprise: (a) a spacer comprising at its 3′ end a sequence corresponding to a listed PEgRNA spacer sequence; (b) a gRNA core capable of complexing with a Cas9 protein, and (c) an extension arm comprising: (i) an editing template comprising at its 3′ end any RTT sequence from the same table as the PEgRNA spacer, and (ii) a prime binding site (PBS) comprising at its 5′ end any PBS sequence from the same table as the PEgRNA spacer. The PEgRNA spacer can be, for example, 17-22 nucleotides in length. The PEgRNA spacers in Tables 1-44 are annotated with their PAM sequence(s), enabling the selection of a prime editor comprising an appropriate Cas9 protein. The editing template can be referred to as a reverse transcription template (RTT). The editing template can encode wildtype USH2a gene sequence (annotated as simply RTT in Tables 1-44). Alternatively, the editing template can encode one or more synonymous mutations relative to the wildtype USH2a gene. The one or more synonymous mutations can be PAM silencing mutations. RTT encoding synonymous PAM silencing mutations are annotated as such in Tables 1-44. In some of Tables 1-44, RTT are further annotated with a * followed by a number code. As described below, a PE3 or PE3b ngRNA spacers annotated with the same * and number code as an RTT has perfect complementarity to the edit strand post-edit by a PEgRNA containing the RTT. The PBS can be, for example, 5 to 19 nucleotides in length.

[0268] The PEgRNA provided in Tables 1-44 can comprise, from 5′ to 3′, the spacer, the gRNA core, the edit template, and the PBS. The 3′ end of the edit template can be contiguous with the 5′ end of the PBS. The PEgRNA can comprise multiple RNA molecules (e.g., a crRNA containing the PEgRNA spacer and a tracrRNA containing the extension arm) or can be a single gRNA molecule. Any PEgRNA exemplified in Tables 1-44 may comprise, or further comprise, a 3′ motif at the 3′ end of the extension arm, for example, a hairpin-forming motif or a series of 1, 2, 3, 4, 5, 6, 7 or more U nucleotides. In some embodiments, the PEgRNA comprises 4 U nucleotides at its 3′ end. Without being bound by theory, such 3′ motifs are believed to increase PEgRNA stability. The PEgRNA may alternatively or additionally comprise one or more chemical modifications, such as phosphorothioate (PS) bond(s), 2′-O-methylated (2′-Ome) nucleotides, or a combination thereof. In some embodiments, the PEgRNA comprise 3′ mN*mN*mN*N and 5′mN*mN*mN* modifications, where m indicates that the nucleotide contains a 2′-O-Me modification and a * indicates the presence of a phosphorothioate bond. PEgRNA sequences exemplified in Tables 1-44 may alternatively be adapted for expression from a DNA template, for example, by including a 5′ terminal G if the spacer of the PEgRNA begins with another nucleotide, by including 6 or 7 U nucleotides at the 3′ end of the extension arm, or both. Such expression-adapted sequences may further comprise a hairpin-forming motif between the PBS and the 3′ terminal U series.

[0269] Any of the PEgRNAs of Tables 1-44 can be used in a Prime Editing system further comprising a nick guide RNA (ngRNA). Such ngRNA can comprise a spacer comprising at its 3′ end a sequence corresponding to nucleotides 4-20 of any ngRNA spacer listed in the same table as the PEgRNA spacer and a gRNA core capable of complexing with a Cas9 protein. For example, the sequence in the spacer of the ngRNA can comprise nucleotides 4-20, 3-20, 2-20, or 1-20 of the listed spacer. In some embodiments, the spacer of the ngRNA is the complete sequence of an ngRNA spacer listed in the same table as the PEgRNA spacer. The ngRNA spacers in Tables 1-44 are annotated with their PAM sequences, enabling selection of an appropriate Cas9 protein. It can be advantageous to select an ngRNA spacer that has a PAM sequence compatible with the Cas9 protein used in the Prime Editor with the PEgRNA, thus avoiding the need to use two different Cas9 proteins. The ngRNA can comprise multiple RNA molecules (e.g., a crRNA containing the ngRNA spacer and a tracrRNA) or can be a single gRNA molecule. The ngRNA is capable of directing a complexed Cas9 protein to bind the edit strand of the USH2A gene; thus, a complexed Cas9 nickase containing a nuclease inactivating mutation in the HNH domain will nick the non-edit strand. A PE3 ngRNA spacer has perfect complementarity to the edit strand both pre- and post-edit; a PE3b ngRNA spacer has perfect complementarity to the edit strand post-edit. A PE3 or PE3b spacer annotated with a * followed by a number code has perfect complementarity to the edit strand post-edit with a PEgRNA containing an RTT from the same Table and annotated with the same number code.

[0270] Any ngRNA sequence provided in Tables 1-44 may comprise, or further comprise, a 3′ motif at their 3′ end, for example, a series of 1, 2, 3, 4, 5, 6, 7 or more U nucleotides. In some embodiments, the ngRNA comprises 4 U nucleotides at its 3′ end. Without being bound by theory, such 3′ motifs are believed to increase ngRNA stability. The ngRNA may alternatively or additionally comprise one or more chemical modifications, such as phosphorothioate (PS) bond(s), 2′-O-methylated (2′-Ome) nucleotides, or a combination thereof. In some embodiments, the ngRNA comprise 3′ mN*mN*mN*N and 5′mN*mN*mN* modifications, where m indicates that the nucleotide contains a 2′-O-Me modification and a * indicates the presence of a phosphorothioate bond. NgRNA sequences may alternatively be adapted for expression from a DNA template, for example, by including a 5′ terminal G if the spacer of the ngRNA begins with another nucleotide, by including 6 or 7 U nucleotides at the 3′ end of the ngRNA, or both.

[0271] In some embodiments, the gRNA core for the PEgRNA and/or the ngRNA comprises a sequence selected from SEQ ID NOs: 7543, 7544, 7545, or 7546. In some embodiments, the gRNA core comprises SEQ ID NO: 7544.

[0272] Table 1 provides Prime Editing guide RNAs (PEgRNAs) that can be used with any Prime Editor containing a Cas9 protein capable of recognizing a TAG PAM sequence. The PEgRNAs of Table 1 can also be used in Prime Editing systems further comprising a nick guide RNA (ngRNA). Such PEgRNAs and Prime Editing systems can be used, for example, to correct an c.2299delG mutation in USH2a.

[0273] The PEgRNAs exemplified in Table 1 comprise: (a) a spacer comprising at its 3′ end a sequence corresponding to sequence number 618; (b) a gRNA core capable of complexing with a Cas9 protein, and (c) an extension arm comprising: (i) an editing template at least 9 nucleotides in length and comprising at its 3′ end a sequence corresponding to sequence number 635, and (ii) a prime binding site (PBS) comprising at its 5′ end a sequence corresponding to sequence number 621. The PEgRNA spacer can be, for example, 17-22 nucleotides in length and can comprise the sequence corresponding to any one of sequence numbers 618, 160, 402, 32, 619, or 620. In some embodiments, the PEgRNA spacer comprises sequence number 32. The PEgRNA spacers in Table 1 are annotated with their PAM sequence(s), enabling the selection of an appropriate Cas9 protein. The editing template can be referred to as a reverse transcription template (RTT). The editing template can encode wildtype USH2a gene sequence. For example, the editing template can comprise at its 3′ end the sequence corresponding to sequence number 635, 636, 637, 638, 639, 640, 641, 642, 643, 644, 645, 646, 647, 648, 649, 650, 651, 652, 653, 654, 655, 656, 657, 658, 659, 660, 661, 662, 663, 664, 665, or 666. The PBS can be, for example, 5 to 19 nucleotides in length and can comprise the sequence corresponding to any one of sequence numbers 621, 622, 623, 624, 625, 626, 627, 628, 629, 630, 631, 632, 633, 142, or 634.

[0274] Any of the PEgRNAs of Table 1 can be used in a Prime Editing system further comprising a nick guide RNA (ngRNA). Such ngRNA can comprise a spacer comprising at its 3′ end a sequence corresponding to nucleotides 4-20 of any ngRNA spacer listed in Table 1 and a gRNA core capable of complexing with a Cas9 protein. For example, the sequence in the spacer of the ngRNA can comprise nucleotides 4-20, 3-20, 2-20, or 1-20 of sequence number 667, 668, or 669. In some embodiments, the spacer of the ngRNA is a ngRNA spacer listed in Table 1. The ngRNA spacers in Table 1 are annotated with their PAM sequences, enabling selection of an appropriate Cas9 protein. It can be advantageous to select a ngRNA spacer that has a PAM sequence compatible with the Cas9 protein used in the Prime Editor, thus avoiding the need to use two different Cas9 proteins.

[0275] Table 2 provides Prime Editing guide RNAs (PEgRNAs) that can be used with any Prime Editor containing a Cas9 protein capable of recognizing an ACAAAT PAM sequence. The PEgRNAs of Table 2 can also be used in Prime Editing systems further comprising a nick guide RNA (ngRNA). Such PEgRNAs and Prime Editing systems can be used, for example, to correct a c.2299delG mutation in USH2a. Some PEgRNAs in Table 2 can also be used to correct a c.2276 G->T mutation in USH2a.

[0276] The PEgRNAs exemplified in Table 2 comprise: (a) a spacer comprising at its 3′ end a sequence corresponding to sequence number 618; (b) a gRNA core capable of complexing with a Cas9 protein, and (c) an extension arm comprising: (i) an editing template at least 40 nucleotides in length and comprising at its 3′ end a sequence corresponding to sequence number 512, and (ii) a prime binding site (PBS) comprising at its 5′ end a sequence corresponding to sequence number 474. The PEgRNA spacer can be, for example, 17-22 nucleotides in length and can comprise the sequence corresponding to any one of sequence numbers 469, 470, 471, 288, 472, or 473. In some embodiments, the PEgRNA spacer comprises sequence number 288. The PEgRNA spacers in Table 2 are annotated with their PAM sequence(s), enabling the selection of an appropriate Cas9 protein. The editing template can be referred to as a reverse transcription template (RTT). The editing template can encode wildtype USH2a gene sequence. The PBS can be, for example, 5 to 19 nucleotides in length and can comprise the sequence corresponding to any one of sequence numbers 474, 475, 476, 477, 478, 479, 480, 481, 482, 483, 484, 485, 486, 487, or 488. The PEgRNA can comprise, from 5′ to 3′, the spacer, the gRNA core, the edit template, and the PBS. The 3′ end of the edit template can be contiguous with the 5′ end of the PBS. The PEgRNA can comprise multiple RNA molecules or can be a single RNA molecule.

[0277] Any of the PEgRNAs of Table 2 can be used in a Prime Editing system further comprising a nick guide RNA (ngRNA). Such ngRNA can comprise a spacer comprising at its 3′ end a sequence corresponding to nucleotides 4-20 of any ngRNA spacer listed in Table 2 and a gRNA core capable of complexing with a Cas9 protein. For example, the sequence in the spacer of the ngRNA can comprise nucleotides 4-20, 3-20, 2-20, or 1-20 of sequence number 376, 144, 378, 379, 380, or 381. In some embodiments, the spacer of the ngRNA is a ngRNA spacer listed in Table 2. The ngRNA spacers in Table 2 are annotated with their PAM sequences, enabling selection of an appropriate Cas9 protein. It can be advantageous to select a ngRNA spacer that has a PAM sequence compatible with the Cas9 protein used in the Prime Editor, thus avoiding the need to use two different Cas9 proteins.

[0278] Table 3 provides Prime Editing guide RNAs (PEgRNAs) that can be used with any Prime Editor containing a Cas9 protein capable of recognizing a TG PAM sequence. The PEgRNAs of Table 3 can also be used in Prime Editing systems further comprising a nick guide RNA (ngRNA). Such PEgRNAs and Prime Editing systems can be used, for example, to correct a c.2299delG mutation in USH2a. Some PEgRNAs in Table 3 can also be used to correct a c.2276 G->T mutation in USH2a.

[0279] The PEgRNAs exemplified in Table 3 comprise: (a) a spacer comprising at its 3′ end a sequence corresponding to sequence number 1; (b) a gRNA core capable of complexing with a Cas9 protein, and (c) an extension arm comprising: (i) an editing template at least 11 nucleotides in length and comprising at its 3′ end a sequence corresponding to any one of sequence numbers 670, 671, 672, 673, or 674, and (ii) a prime binding site (PBS) comprising at its 5′ end a sequence corresponding to sequence number 7. The PEgRNA spacer can be, for example, 17-22 nucleotides in length and can comprise the sequence corresponding to any one of sequence numbers 1-6. In some embodiments, the PEgRNA spacer comprises sequence number 4. The PEgRNA spacers in Table 3 are annotated with their PAM sequence(s), enabling the selection of an appropriate Cas9 protein. The editing template can be referred to as a reverse transcription template (RTT). The editing template can encode wildtype USH2a gene sequence. For example, the editing template can comprise at its 3′ end the sequence corresponding to sequence number 670, 671, 672, 673, 675, 677, 679, 681, 683, 685, 687, 689, 691, 693, 695, 697, 699, 701, 703, 705, 707, 709, 711, 713, 715, 717, 22, 24, 26, or 28. Alternatively, the editing template can encode one or more synonymous mutations relative to the wildtype USH2A gene. The editing template can encode one or more synonymous mutations that are PAM silencing mutations and can comprise at its 3′ end the sequence corresponding to sequence number 674, 676, 678, 680, 682, 684, 686, 688, 690, 692, 694, 696, 698, 700, 702, 704, 706, 708, 710, 712, 714, 716, 718, 23, 25, 27, or 29. The PBS can be, for example, 5 to 19 nucleotides in length and can comprise the sequence corresponding to any one of sequence numbers 7, 8, 9, 10, 11, 12, 13, 14, 15, 16, 17, 18, 19, 20, or 21. The PEgRNA can comprise, from 5′ to 3′, the spacer, the gRNA core, the edit template, and the PBS. The 3′ end of the edit template can be contiguous with the 5′ end of the PBS. The PEgRNA can comprise multiple RNA molecules or can be a single RNA molecule.

[0280] Any of the PEgRNAs of Table 3 can be used in a Prime Editing system further comprising a nick guide RNA (ngRNA). Such ngRNA can comprise a spacer comprising at its 3′ end a sequence corresponding to nucleotides 4-20 of any ngRNA spacer listed in Table 3 and a gRNA core capable of complexing with a Cas9 protein. For example, the sequence in the spacer of the ngRNA can comprise nucleotides 4-20, 3-20, 2-20, or 1-20 of sequence number 30, 31, 33, 34, 35, 282, 36, 37, 38, 39, 40, 41, 42, 43, 44, 45, 46, 47, 48, 49, 50, 51, 52, 53, or 54. In some embodiments, the spacer of the ngRNA is a ngRNA spacer listed in Table 3. The ngRNA spacers in Table 3 are annotated with their PAM sequences, enabling selection of an appropriate Cas9 protein. It can be advantageous to select a ngRNA spacer that has a PAM sequence compatible with the Cas9 protein used in the Prime Editor, thus avoiding the need to use two different Cas9 proteins. The ngRNA is capable of directing a complexed Cas9 protein to bind the edit strand of the USH2a gene; thus, a complexed Cas9 nickase containing a nuclease inactivating mutation in the HNH domain will nick the non-edit strand. A PE3 ngRNA spacer has perfect complementarity to the edit strand both pre- and post-edit; a PE3b ngRNA spacer has perfect complementarity to the edit strand post-edit. A PE3 or PE3b ngRNA spacer in Table 3 annotated with the same * and number code as an RTT in Table 3 has perfect complementarity to the edit strand post-edit by a PEgRNA containing the RTT.

[0281] Table 4 provides Prime Editing guide RNAs (PEgRNAs) that can be used with any Prime Editor containing a Cas9 protein capable of recognizing a TTGG PAM sequence. The PEgRNAs of Table 4 can also be used in Prime Editing systems further comprising a nick guide RNA (ngRNA). Such PEgRNAs and Prime Editing systems can be used, for example, to correct a c.2299delG mutation in USH2a.

[0282] The PEgRNAs exemplified in Table 4 comprise: (a) a spacer comprising at its 3′ end a sequence corresponding to sequence number 1556; (b) a gRNA core capable of complexing with a Cas9 protein, and (c) an extension arm comprising: (i) an editing template at least 24 nucleotides in length and comprising at its 3′ end a sequence corresponding to any one of sequence numbers 1561, 1562, 1563, 1564, or 1565, and (ii) a prime binding site (PBS) comprising at its 5′ end a sequence corresponding to sequence number 1541. The PEgRNA spacer can be, for example, 17-22 nucleotides in length and can comprise the sequence corresponding to any one of sequence numbers 1556, 1557, 1558, 1079, 1559, or 1560. In some embodiments, the PEgRNA spacer comprises sequence number 1079. The PEgRNA spacers in Table 4 are annotated with their PAM sequence(s), enabling the selection of an appropriate Cas9 protein. The editing template can be referred to as a reverse transcription template (RTT). The editing template can encode wildtype USH2a gene sequence. For example, the editing template can comprise at its 3′ end the sequence corresponding to sequence number 1561, 1562, 1563, 1564, or 1565. Alternatively, the editing template can encode one or more synonymous mutations relative to the wildtype USH2A gene. The editing template can encode one or more synonymous mutations that are PAM silencing mutations and can comprise at its 3′ end the sequence corresponding to sequence number 1564, 1566, 1567, 1568, 1570, 1571, 1572, 1574, 1575, 1576, 1578, 1579, 1580, 1582, 1583, 1584, 1586, 1587, 1588, 1590, 1591, 1592, 1594, 1595, 1596, 1598, 1599, 1600, 1602, 1603, 1604, 1606, 1607, 1608, 1610, 1611, 1612, 1614, 1615, 1616, 1618, or 1619. The PBS can be, for example, 5 to 19 nucleotides in length and can comprise the sequence corresponding to any one of sequence numbers 1541, 1542, 1543, 1544, 1545, 1546, 1547, 1548, 1549, 1550, 1551, 1552, 1553, 1554, or 1555.

[0283] The PEgRNA can comprise, from 5′ to 3′, the spacer, the gRNA core, the edit template, and the PBS. The 3′ end of the edit template can be contiguous with the 5′ end of the PBS. The PEgRNA can comprise multiple RNA molecules or can be a single RNA molecule.

[0284] Any of the PEgRNAs of Table 4 can be used in a Prime Editing system further comprising a nick guide RNA (ngRNA). Such ngRNA can comprise a spacer comprising at its 3′ end a sequence corresponding to nucleotides 4-20 of any ngRNA spacer listed in Table 4 and a gRNA core capable of complexing with a Cas9 protein. For example, the sequence in the spacer of the ngRNA can comprise nucleotides 4-20, 3-20, 2-20, or 1-20 of sequence number 30, 962, 1043, 290, 1620, 1621, 1622, or 1623. In some embodiments, the spacer of the ngRNA is a ngRNA spacer listed in Table 4. The ngRNA spacers in Table 4 are annotated with their PAM sequences, enabling selection of an appropriate Cas9 protein. It can be advantageous to select a ngRNA spacer that has a PAM sequence compatible with the Cas9 protein used in the Prime Editor, thus avoiding the need to use two different Cas9 proteins. The ngRNA is capable of directing a complexed Cas9 protein to bind the edit strand of the USH2a gene; thus, a complexed Cas9 nickase containing a nuclease inactivating mutation in the HNH domain will nick the non-edit strand. A PE3 ngRNA spacer has perfect complementarity to the edit strand both pre- and post-edit; a PE3b ngRNA spacer has perfect complementarity to the edit strand post-edit. A PE3 or PE3b ngRNA spacer in Table 4 annotated with the same * and number code as an RTT in Table 4 has perfect complementarity to the edit strand post-edit by a PEgRNA containing the RTT.

[0285] Table 5 provides Prime Editing guide RNAs (PEgRNAs) that can be used with any Prime Editor containing a Cas9 protein capable of recognizing a CTGG PAM sequence. The PEgRNAs of Table 5 can also be used in Prime Editing systems further comprising a nick guide RNA (ngRNA). Such PEgRNAs and Prime Editing systems can be used, for example, to correct a c.2299delG mutation in USH2a.

[0286] The PEgRNAs exemplified in Table 5 comprise: (a) a spacer comprising at its 3′ end a sequence corresponding to sequence number 950; (b) a gRNA core capable of complexing with a Cas9 protein, and (c) an extension arm comprising: (i) an editing template at least 16 nucleotides in length and comprising at its 3′ end a sequence corresponding to sequence number 1638, and (ii) a prime binding site (PBS) comprising at its 5′ end a sequence corresponding to sequence number 1624. The PEgRNA spacer can be, for example, 17-22 nucleotides in length and can comprise the sequence corresponding to any one of sequence numbers 950, 954, 958, 962, 966, or 970. In some embodiments, the PEgRNA spacer comprises sequence number 962. The PEgRNA spacers in Table 5 are annotated with their PAM sequence(s), enabling the selection of an appropriate Cas9 protein. The editing template can be referred to as a reverse transcription template (RTT). The editing template can encode wildtype USH2a gene sequence. For example, the editing template can comprise at its 3′ end the sequence corresponding to sequence number 1638, 932, 933, 934, 379, 935, 936, 1639, 1640, 1641, 1642, 1643, 1644, 1645, 1646, 1647, 1648, 1649, 1650, 1651, 1652, 1653, 1654, 1655, or 1656. The PBS can be, for example, 5 to 19 nucleotides in length and can comprise the sequence corresponding to any one of sequence numbers 1624, 1625, 1626, 1627, 1628, 1629, 1630, 1631, 320, 1632, 1633, 1634, 1635, 1636, or 1637. The PEgRNA can comprise, from 5′ to 3′, the spacer, the gRNA core, the edit template, and the PBS. The 3′ end of the edit template can be contiguous with the 5′ end of the PBS. The PEgRNA can comprise multiple RNA molecules or can be a single RNA molecule.

[0287] Any of the PEgRNAs of Table 5 can be used in a Prime Editing system further comprising a nick guide RNA (ngRNA). Such ngRNA can comprise a spacer comprising at its 3′ end a sequence corresponding to nucleotides 4-20 of any ngRNA spacer listed in Table 5 and a gRNA core capable of complexing with a Cas9 protein. For example, the sequence in the spacer of the ngRNA can comprise nucleotides 4-20, 3-20, 2-20, or 1-20 of sequence number 667, 1079, 1657, or 379. In some embodiments, the spacer of the ngRNA is a ngRNA spacer listed in Table 5. The ngRNA spacers in Table 5 are annotated with their PAM sequences, enabling selection of an appropriate Cas9 protein. It can be advantageous to select a ngRNA spacer that has a PAM sequence compatible with the Cas9 protein used in the Prime Editor, thus avoiding the need to use two different Cas9 proteins. The ngRNA is capable of directing a complexed Cas9 protein to bind the edit strand of the USH2a gene; thus, a complexed Cas9 nickase containing a nuclease inactivating mutation in the HNH domain will nick the non-edit strand. A PE3 ngRNA spacer has perfect complementarity to the edit strand both pre- and post-edit; a PE3b ngRNA spacer has perfect complementarity to the edit strand post-edit.

[0288] Table 6 provides Prime Editing guide RNAs (PEgRNAs) that can be used with any Prime Editor containing a Cas9 protein capable of recognizing an AG PAM sequence. The PEgRNAs of Table 6 can also be used in Prime Editing systems further comprising a nick guide RNA (ngRNA). Such PEgRNAs and Prime Editing systems can be used, for example, to correct a c.2299delG mutation in USH2a.

[0289] The PEgRNAs exemplified in Table 6 comprise: (a) a spacer comprising at its 3′ end a sequence corresponding to sequence number 1673; (b) a gRNA core capable of complexing with a Cas9 protein, and (c) an extension arm comprising: (i) an editing template at least 30 nucleotides in length and comprising at its 3′ end a sequence corresponding to any one of sequence numbers 1679, 1680, 1681, 1682, 1683, or 1684, and (ii) a prime binding site (PBS) comprising at its 5′ end a sequence corresponding to sequence number 1658. The PEgRNA spacer can be, for example, 17-22 nucleotides in length and can comprise the sequence corresponding to any one of sequence numbers 1673, 1674, 1675, 1676, 1677, or 1678. In some embodiments, the PEgRNA spacer comprises sequence number 1676. The PEgRNA spacers in Table 6 are annotated with their PAM sequence(s), enabling the selection of an appropriate Cas9 protein. The editing template can be referred to as a reverse transcription template (RTT). The editing template can encode wildtype USH2a gene sequence. For example, the editing template can comprise at its 3′ end the sequence corresponding to sequence number 1679, 1680, 1681, 1682, 1685, 1688, 1691, 1694, 1697, 1700, 1703, 1706, or 1706. Alternatively, the editing template can encode one or more synonymous mutations relative to the wildtype USH2A gene. The editing template can encode one or more synonymous mutations that are PAM silencing mutations and can comprise at its 3′ end the sequence corresponding to sequence number 1683, 1684, 1686, 1687, 1689, 1690, 1692, 1693, 1695, 1696, 1698, 1699, 1701, 1702, 1704, or 1705. The PBS can be, for example, 5 to 19 nucleotides in length and can comprise the sequence corresponding to any one of sequence numbers 1658, 1659, 1660, 1661, 1662, 1663, 1664, 1665, 1666, 1667, 1668, 1669, 1670, 1671, or 1672. The PEgRNA can comprise, from 5′ to 3′, the spacer, the gRNA core, the edit template, and the PBS. The 3′ end of the edit template can be contiguous with the 5′ end of the PBS. The PEgRNA can comprise multiple RNA molecules or can be a single RNA molecule.

[0290] Any of the PEgRNAs of Table 6 can be used in a Prime Editing system further comprising a nick guide RNA (ngRNA). Such ngRNA can comprise a spacer comprising at its 3′ end a sequence corresponding to nucleotides 4-20 of any ngRNA spacer listed in Table 6 and a gRNA core capable of complexing with a Cas9 protein. For example, the sequence in the spacer of the ngRNA can comprise nucleotides 4-20, 3-20, 2-20, or 1-20 of sequence number 1706, 1707, 1708, 30, 1709, 1710, 1711, 33, 34, 1712, 35, 282, 36, 37, 1713, 38, 39, 40, 42, 43, 1714, 1715, 1716, 44, 1717, 45, 46, 48, 50, 51, or 52. In some embodiments, the spacer of the ngRNA is a ngRNA spacer listed in Table 6. The ngRNA spacers in Table 6 are annotated with their PAM sequences, enabling selection of an appropriate Cas9 protein. It can be advantageous to select a ngRNA spacer that has a PAM sequence compatible with the Cas9 protein used in the Prime Editor, thus avoiding the need to use two different Cas9 proteins. The ngRNA is capable of directing a complexed Cas9 protein to bind the edit strand of the USH2a gene; thus, a complexed Cas9 nickase containing a nuclease inactivating mutation in the HNH domain will nick the non-edit strand. A PE3 ngRNA spacer has perfect complementarity to the edit strand both pre- and post-edit; a PE3b ngRNA spacer has perfect complementarity to the edit strand post-edit.

[0291] Table 7 provides Prime Editing guide RNAs (PEgRNAs) that can be used with any Prime Editor containing a Cas9 protein capable of recognizing a GG PAM sequence. The PEgRNAs of Table 7 can also be used in Prime Editing systems further comprising a nick guide RNA (ngRNA). Such PEgRNAs and Prime Editing systems can be used, for example, to correct a c.2299delG mutation in USH2a.

[0292] The PEgRNAs exemplified in Table 7 comprise: (a) a spacer comprising at its 3′ end a sequence corresponding to sequence number 1733; (b) a gRNA core capable of complexing with a Cas9 protein, and (c) an extension arm comprising: (i) an editing template at least 22 nucleotides in length and comprising at its 3′ end a sequence corresponding to any one of sequence numbers 1739, and (ii) a prime binding site (PBS) comprising at its 5′ end a sequence corresponding to sequence number 1718. The PEgRNA spacer can be, for example, 17-22 nucleotides in length and can comprise the sequence corresponding to any one of sequence numbers 1733, 1734, 1735, 1736, 1737, or 1738. In some embodiments, the PEgRNA spacer comprises sequence number 1736. The PEgRNA spacers in Table 7 are annotated with their PAM sequence(s), enabling the selection of an appropriate Cas9 protein. The editing template can be referred to as a reverse transcription template (RTT). The editing template can encode wildtype USH2a gene sequence. For example, the editing template can comprise at its 3′ end the sequence corresponding to sequence number 1739, 1740, 1741, 1742, 1743, 1744, 1745, 1746, 1747, 1748, 1749, 1750, 1751, 1752, 1753, 1754, 1755, 1756, or 1757. The PBS can be, for example, 5 to 19 nucleotides in length and can comprise the sequence corresponding to any one of sequence numbers 1718, 1719, 1720, 1721, 1722, 1723, 1724, 1725, 1726, 1727, 1728, 1729, 1730, 1731, or 1732. The PEgRNA can comprise, from 5′ to 3′, the spacer, the gRNA core, the edit template, and the PBS. The 3′ end of the edit template can be contiguous with the 5′ end of the PBS. The PEgRNA can comprise multiple RNA molecules or can be a single RNA molecule.

[0293] Any of the PEgRNAs of Table 7 can be used in a Prime Editing system further comprising a nick guide RNA (ngRNA). Such ngRNA can comprise a spacer comprising at its 3′ end a sequence corresponding to nucleotides 4-20 of any ngRNA spacer listed in Table 7 and a gRNA core capable of complexing with a Cas9 protein. For example, the sequence in the spacer of the ngRNA can comprise nucleotides 4-20, 3-20, 2-20, or 1-20 of sequence number 30, 33, 34, 1712, 35, 282, 36, 37, 1713, 38, 39, 40, 41, 42, 43, 44, 1717, 45, 46, 48, 49, 50, 51, 52, or 54. In some embodiments, the spacer of the ngRNA is a ngRNA spacer listed in Table 7. The ngRNA spacers in Table 7 are annotated with their PAM sequences, enabling selection of an appropriate Cas9 protein. It can be advantageous to select a ngRNA spacer that has a PAM sequence compatible with the Cas9 protein used in the Prime Editor, thus avoiding the need to use two different Cas9 proteins. The ngRNA is capable of directing a complexed Cas9 protein to bind the edit strand of the USH2a gene; thus, a complexed Cas9 nickase containing a nuclease inactivating mutation in the HNH domain will nick the non-edit strand. A PE3 ngRNA spacer has perfect complementarity to the edit strand both pre- and post-edit; a PE3b ngRNA spacer has perfect complementarity to the edit strand post-edit.

[0294] Table 8 provides Prime Editing guide RNAs (PEgRNAs) that can be used with any Prime Editor containing a Cas9 protein capable of recognizing an AAG PAM sequence. The PEgRNAs of Table 8 can also be used in Prime Editing systems further comprising a nick guide RNA (ngRNA). Such PEgRNAs and Prime Editing systems can be used, for example, to correct a c.2299delG mutation in USH2a.

[0295] The PEgRNAs exemplified in Table 8 comprise: (a) a spacer comprising at its 3′ end a sequence corresponding to sequence number 1773; (b) a gRNA core capable of complexing with a Cas9 protein, and (c) an extension arm comprising: (i) an editing template at least 31 nucleotides in length and comprising at its 3′ end a sequence corresponding to any one of sequence numbers 1778, 1779, or 1785 and (ii) a prime binding site (PBS) comprising at its 5′ end a sequence corresponding to sequence number 1758. The PEgRNA spacer can be, for example, 17-22 nucleotides in length and can comprise the sequence corresponding to any one of sequence numbers 1773, 1774, 1775, 668, 1776, or 1777. In some embodiments, the PEgRNA spacer comprises sequence number 668. The PEgRNA spacers in Table 8 are annotated with their PAM sequence(s), enabling the selection of an appropriate Cas9 protein. The editing template can be referred to as a reverse transcription template (RTT). The editing template can encode wildtype USH2a gene sequence. For example, the editing template can comprise at its 3′ end the sequence corresponding to sequence number 1778, 1780, 1782, 1784, 1787, 1790, 1793, 1796, 1799, or 1802. Alternatively, the editing template can encode one or more synonymous mutations relative to the wildtype USH2A gene. The editing template can encode one or more synonymous mutations that are PAM silencing mutations and can comprise at its 3′ end the sequence corresponding to sequence number 1779, 1781, 1783, 1785, 1786, 1788, 1789, 1791, 1792, 1794, 1795, 1797, 1798, 1800, 1801, 1803, or 1804. The PBS can be, for example, 5 to 19 nucleotides in length and can comprise the sequence corresponding to any one of sequence numbers 1758, 1759, 1760, 1761, 1762, 1763, 1764, 1765, 1766, 1767, 1768, 1769, 1770, 1771, or 1772. The PEgRNA can comprise, from 5′ to 3′, the spacer, the gRNA core, the edit template, and the PBS. The 3′ end of the edit template can be contiguous with the 5′ end of the PBS. The PEgRNA can comprise multiple RNA molecules or can be a single RNA molecule.

[0296] Any of the PEgRNAs of Table 8 can be used in a Prime Editing system further comprising a nick guide RNA (ngRNA). Such ngRNA can comprise a spacer comprising at its 3′ end a sequence corresponding to nucleotides 4-20 of any ngRNA spacer listed in Table 8 and a gRNA core capable of complexing with a Cas9 protein. For example, the sequence in the spacer of the ngRNA can comprise nucleotides 4-20, 3-20, 2-20, or 1-20 of sequence number 1805, 1806, 1807, 32, 284, 285, 1808, 287, 1303, 1621, or 685. In some embodiments, the spacer of the ngRNA is a ngRNA spacer listed in Table 8. The ngRNA spacers in Table 8 are annotated with their PAM sequences, enabling selection of an appropriate Cas9 protein. It can be advantageous to select a ngRNA spacer that has a PAM sequence compatible with the Cas9 protein used in the Prime Editor, thus avoiding the need to use two different Cas9 proteins. The ngRNA is capable of directing a complexed Cas9 protein to bind the edit strand of the USH2a gene; thus, a complexed Cas9 nickase containing a nuclease inactivating mutation in the HNH domain will nick the non-edit strand. A PE3 ngRNA spacer has perfect complementarity to the edit strand both pre- and post-edit; a PE3b ngRNA spacer has perfect complementarity to the edit strand post-edit.

[0297] Table 9 provides Prime Editing guide RNAs (PEgRNAs) that can be used with any Prime Editor containing a Cas9 protein capable of recognizing a CAG PAM sequence. The PEgRNAs of Table 9 can also be used in Prime Editing systems further comprising a nick guide RNA (ngRNA). Such PEgRNAs and Prime Editing systems can be used, for example, to correct a c.2299delG mutation in USH2a.

[0298] The PEgRNAs exemplified in Table 9 comprise: (a) a spacer comprising at its 3′ end a sequence corresponding to sequence number 1823; (b) a gRNA core capable of complexing with a Cas9 protein, and (c) an extension arm comprising: (i) an editing template at least 11 nucleotides in length and comprising at its 3′ end a sequence corresponding to any one of sequence numbers 1824 or 1825, and (ii) a prime binding site (PBS) comprising at its 5′ end a sequence corresponding to sequence number 1809. The PEgRNA spacer can be, for example, 17-22 nucleotides in length and can comprise the sequence corresponding to any one of sequence numbers 1823, 1327, 1328, 1303, 1331, 1334. In some embodiments, the PEgRNA spacer comprises sequence number 1303. The PEgRNA spacers in Table 9 are annotated with their PAM sequence(s), enabling the selection of an appropriate Cas9 protein. The editing template can be referred to as a reverse transcription template (RTT). The editing template can encode wildtype USH2a gene sequence. For example, the editing template can comprise at its 3′ end the sequence corresponding to sequence number 1824, 1826, 1828, 1830, 1832, 1834, 1321, 1322, 1323, 1324, 1325, 1326, 1842, 1844, 1846, 1848, 1850, 1852, 1854, 1856, 1858, 1860, 1862, 1864, 1866, 1868, 1870, 1872, 1874, or 1876. Alternatively, the editing template can encode one or more synonymous mutations relative to the wildtype USH2A gene. The editing template can encode one or more synonymous mutations that are PAM silencing mutations and can comprise at its 3′ end the sequence corresponding to sequence number 1825, 1827, 1829, 1831, 1833, 1835, 1836, 1837, 1838, 1839, 1840, 1841, 1843, 1845, 1847, 1849, 1851, 1853, 1855, 1857, 1859, 1861, 1863, 1865, 1867, 1869, 1871, 1873, 1875, or 1877. The PBS can be, for example, 5 to 19 nucleotides in length and can comprise the sequence corresponding to any one of sequence numbers 1809, 1810, 1811, 1812, 1813, 1814, 1815, 1816, 1817, 1818, 1819, 1820, 1821, 330, or 1822. The PEgRNA can comprise, from 5′ to 3′, the spacer, the gRNA core, the edit template, and the PBS. The 3′ end of the edit template can be contiguous with the 5′ end of the PBS. The PEgRNA can comprise multiple RNA molecules or can be a single RNA molecule.

[0299] Any of the PEgRNAs of Table 9 can be used in a Prime Editing system further comprising a nick guide RNA (ngRNA). Such ngRNA can comprise a spacer comprising at its 3′ end a sequence corresponding to nucleotides 4-20 of any ngRNA spacer listed in Table 9 and a gRNA core capable of complexing with a Cas9 protein. For example, the sequence in the spacer of the ngRNA can comprise nucleotides 4-20, 3-20, 2-20, or 1-20 of sequence number 667, 668, 669, 747, 1878, 381, or 1879. In some embodiments, the spacer of the ngRNA is a ngRNA spacer listed in Table 9. The ngRNA spacers in Table 9 are annotated with their PAM sequences, enabling selection of an appropriate Cas9 protein. It can be advantageous to select a ngRNA spacer that has a PAM sequence compatible with the Cas9 protein used in the Prime Editor, thus avoiding the need to use two different Cas9 proteins. The ngRNA is capable of directing a complexed Cas9 protein to bind the edit strand of the USH2a gene; thus, a complexed Cas9 nickase containing a nuclease inactivating mutation in the HNH domain will nick the non-edit strand. A PE3 ngRNA spacer has perfect complementarity to the edit strand both pre- and post-edit; a PE3b ngRNA spacer has perfect complementarity to the edit strand post-edit. A PE3 or PE3b ngRNA spacer in Table 9 annotated with the same * and number code as an RTT in Table 9 has perfect complementarity to the edit strand post-edit by a PEgRNA containing the RTT.

[0300] Table 10 provides Prime Editing guide RNAs (PEgRNAs) that can be used with any Prime Editor containing a Cas9 protein capable of recognizing a TG, TGA, or TGAAGT PAM sequence. The PEgRNAs of Table 10 can also be used in Prime Editing systems further comprising a nick guide RNA (ngRNA). Such PEgRNAs and Prime Editing systems can be used, for example, to correct a c.2299delG mutation in USH2a.

[0301] The PEgRNAs exemplified in Table 10 comprise: (a) a spacer comprising at its 3′ end a sequence corresponding to sequence number 3102; (b) a gRNA core capable of complexing with a Cas9 protein, and (c) an extension arm comprising: (i) an editing template at least 36 nucleotides in length and comprising at its 3′ end a sequence corresponding to any one of sequence numbers 3107, 3108, 3109, 3110, 3111, 3112, 3113, 3114, 3115, 3116, 3117, or 3118, and (ii) a prime binding site (PBS) comprising at its 5′ end a sequence corresponding to sequence number 3087. The PEgRNA spacer can be, for example, 17-22 nucleotides in length and can comprise the sequence corresponding to any one of sequence numbers 3102, 3103, 3104, 380, 3105, or 3106. In some embodiments, the PEgRNA spacer comprises sequence number 380. The PEgRNA spacers in Table 10 are annotated with their PAM sequence(s), enabling the selection of an appropriate Cas9 protein. The editing template can be referred to as a reverse transcription template (RTT). The editing template can encode wildtype USH2a gene sequence. For example, the editing template can comprise at its 3′ end the sequence corresponding to sequence number 3107, 3108, 3109, 3113, 3122, 3131, 3140, or 3149. Alternatively, the editing template can encode one or more synonymous mutations relative to the wildtype USH2A gene. The editing template can encode one or more synonymous mutations that are PAM silencing mutations and can comprise at its 3′ end the sequence corresponding to sequence number 3110, 3111, 3112, 3114, 3115, 3116, 3117, 3118, 3119, 3120, 3121, 3123, 3124, 3125, 3126, 3127, 3128, 3129, 3130, 3132, 3133, 3134, 3135, 3136, 3137, 3138, 3139, 3141, 3142, 3143, 3144, 3145, 3146, 3147, 3148, 3150, 3151, 3152, 3153, or 3154. The PBS can be, for example, 5 to 19 nucleotides in length and can comprise the sequence corresponding to any one of sequence numbers 3087, 3088, 3089, 3090, 3091, 3092, 3093, 3094, 3095, 3096, 3097, 3098, 3099, 3100, or 3101.

[0302] The PEgRNA can comprise, from 5′ to 3′, the spacer, the gRNA core, the edit template, and the PBS. The 3′ end of the edit template can be contiguous with the 5′ end of the PBS. The PEgRNA can comprise multiple RNA molecules or can be a single RNA molecule. Exemplary PEgRNAs provided in Table 10 can comprise a sequence corresponding to any one of sequence numbers 3162, 3163, 3164, 3165, 3166, 3167, 3168, 3169, 3170, 3171, 3172, 3173, 3174, 3175, 3176, 3177, 3178, 3179, 3180, 3181, 3182, 3183, 3184, 3185, 3186, 3187, 3188, 3189, 3190, 3191, 3192, 3193, 3194, 3195, 3196, 3197, 3198, 3199, 3200, 3201, 3202, 3203, 3204, 3205, 3206, 3207, 3208, 3209, 3210, 3211, 3212, 3213, 3214, 3215, 3216, 3217, 3218, 3219, 3220, 3221, 3222, 3223, 3224, 3225, 3226, 3227, 3228, 3229, 3230, 3231, 3232, 3233, 3234, 3235, 3236, 3237, 3238, 3239, 3240, 3241, 3242, 3243, 3244, 3245, 3246, 3247, 3248, 3249, 3250, 3251, 3252, 3253, 3254, 3255, 3256, 3257, 3258, 3259, 3260, 3261, 3262, 3263, 3264, 3265, 3266, 3267, 3268, 3269, 3270, 3271, 3272, 3273, 3274, 3275, 3276, 3277, 3278, 3279, 3280, 3281, 3282, 3283, 3284, 3285, 3286, 3287, 3288, 3289, 3290, 3291, 3292, 3293, 3294, 3295, 3296, 3297, 3298, 3299, 3300, 3301, 3302, 3303, 3304, 3305, 3306, 3307, 3308, 3309, 3310, 3311, 3312, 3313, 3314, 3315, 3316, 3317, 3318, 3319, 3320, 3321, 3322, 3323, 3324, 3325, 3326, 3327, 3328, 3329, 3330, 3331, 3332, 3333, 3334, 3335, 3336, 3337, 3338, 3339, 3340, 3341, 3342, 3343, 3344, 3345, 3346, 3347, 3348, 3349, 3350, 3351, 3352, 3353, 3354, 3355, 3356, 3357, 3358, 3359, 3360, 3361, 3362, 3363, 3364, 3365, 3366, 3367, 3368, 3369, 3370, 3371, 3372, 3373, 3374, 3375, 3376, 3377, 3378, 3379, 3380, 3381, 3382, 3383, 3384, 3385, 3386, 3387, 3388, 3389, 3390, 3391, 3392, 3393, 3394, 3395, 3396, 3397, 3398, 3399, 3400, 3401, 3402, 3403, 3404, 3405, 3406, 3407, 3408, 3409, 3410, 3411, 3412, 3413, 3414, 3415, 3416, 3417, 3418, 3419, 3420, 3421, 3422, 3423, 3424, 3425, 3426, 3427, 3428, 3429, 3430, 3431, 3432, 3433, 3434, 3435, 3436, 3437, 3438, 3439, 3440, 3441, 3442, 3443, 3444, 3445, 3446, 3447, 3448, 3449, 3450, 3451, 3452, 3453, 3454, 3455, 3456, 3457, 3458, 3459, 3460, 3461, 3462, 3463, 3464, 3465, 3466, 3467, 3468, 3469, 3470, 3471, 3472, 3473, 3474, 3475, 3476, 3477, 3478, 3479, 3480, 3481, 3482, 3483, 3484, 3485, 3486, 3487, 3488, 3489, 3490, 3491, 3492, 3493, 3494, 3495, 3496, 3497, 3498, 3499, 3500, 3501, 3502, 3503, 3504, 3505, 3506, 3507, 3508, 3509, 3510, 3511, 3512, 3513, 3514, 3515, 3516, 3517, 3518, 3519, 3520, 3521, 3522, 3523, 3524, 3525, 3526, 3527, 3528, 3529, 3530, 3531, 3532, 3533, 3534, 3535, 3536, 3537, 3538, 3539, 3540, 3541, 3542, 3543, 3544, or 3545. Any PEgRNA exemplified in Table 10 may comprise, or further comprise, a 3′ motif at the 3′ end of the extension arm, for example, a hairpin-forming motif or a series of 1, 2, 3, 4, 5, 6, 7 or more U nucleotides. In some embodiments, the PEgRNA comprises 4 U nucleotides at its 3′ end. Without being bound by theory, such 3′ motifs are believed to increase PEgRNA stability. The PEgRNA may alternatively or additionally comprise one or more chemical modifications, such as phosphorothioate (PS) bond(s), 2′-O-methylated (2′-Ome) nucleotides, or a combination thereof. In some embodiments, the PEgRNA comprise 3′ mN*mN*mN*N and 5′mN*mN*mN* modifications, where m indicates that the nucleotide contains a 2′-O-Me modification and a * indicates the presence of a phosphorothioate bond. PEgRNA sequences exemplified in Table 10 may alternatively be adapted for expression from a DNA template, for example, by including a 5′ terminal G if the spacer of the PEgRNA begins with another nucleotide, by including 6 or 7 U nucleotides at the 3′ end of the extension arm, or both. Such expression-adapted sequences may further comprise a hairpin-forming motif between the PBS and the 3′ terminal U series.

[0303] Any of the PEgRNAs of Table 10 can be used in a Prime Editing system further comprising a nick guide RNA (ngRNA). Such ngRNA can comprise a spacer comprising at its 3′ end a sequence corresponding to nucleotides 4-20 of any ngRNA spacer listed in Table 10 and a gRNA core capable of complexing with a Cas9 protein. For example, the sequence in the spacer of the ngRNA can comprise nucleotides 4-20, 3-20, 2-20, or 1-20 of sequence number 1706, 30, 1709, 33, 1712, 35, 282, 36, 3155, 3156, 3157, 3158, 37, 1713, 38, 39, 40, 42, 43, 3159, 3160, 3161, 1714, 1715, 1716, 1717, 45, 46, 48, 288, 50, 292, 293, 51, or 52. In some embodiments, the spacer of the ngRNA is a ngRNA spacer listed in Table 10. The ngRNA spacers in Table 10 are annotated with their PAM sequences, enabling selection of an appropriate Cas9 protein. It can be advantageous to select a ngRNA spacer that has a PAM sequence compatible with the Cas9 protein used in the Prime Editor, thus avoiding the need to use two different Cas9 proteins. The ngRNA is capable of directing a complexed Cas9 protein to bind the edit strand of the USH2a gene; thus, a complexed Cas9 nickase containing a nuclease inactivating mutation in the HNH domain will nick the non-edit strand. A PE3 ngRNA spacer has perfect complementarity to the edit strand both pre- and post-edit; a PE3b ngRNA spacer has perfect complementarity to the edit strand post-edit. A PE3 or PE3b ngRNA spacer in Table 10 annotated with the same * and number code as an RTT in Table 10 has perfect complementarity to the edit strand post-edit by a PEgRNA containing the RTT.

[0304] Table 11 provides Prime Editing guide RNAs (PEgRNAs) that can be used with any Prime Editor containing a Cas9 protein capable of recognizing a TG or TGG PAM sequence. The PEgRNAs of Table 11 can also be used in Prime Editing systems further comprising a nick guide RNA (ngRNA). Such PEgRNAs and Prime Editing systems can be used, for example, to correct a c.2299delG mutation in USH2a.

[0305] The PEgRNAs exemplified in Table 11 comprise: (a) a spacer comprising at its 3′ end a sequence corresponding to sequence number 3561; (b) a gRNA core capable of complexing with a Cas9 protein, and (c) an extension arm comprising: (i) an editing template at least 23 nucleotides in length and comprising at its 3′ end a sequence corresponding to any one of sequence numbers 3567, 3568, 3573, or 3575, and (ii) a prime binding site (PBS) comprising at its 5′ end a sequence corresponding to sequence number 3546. The PEgRNA spacer can be, for example, 17-22 nucleotides in length and can comprise the sequence corresponding to any one of sequence numbers 3561, 3562, 3563, 3564, 3565, or 3566. In some embodiments, the PEgRNA spacer comprises sequence number 3564. The PEgRNA spacers in Table 11 are annotated with their PAM sequence(s), enabling the selection of an appropriate Cas9 protein. The editing template can be referred to as a reverse transcription template (RTT). The editing template can encode wildtype USH2a gene sequence. For example, the editing template can comprise at its 3′ end the sequence corresponding to sequence number 3567, 3569, 3571, 3574, 3578, 3582, 3586, 3590, 3594, 3598, 3602, 3606, 3610, 3614, 3618, 3622, 3626, or 3630. Alternatively, the editing template can encode one or more synonymous mutations relative to the wildtype USH2A gene. The editing template can encode one or more synonymous mutations that are PAM silencing mutations and can comprise at its 3′ end the sequence corresponding to sequence number 3570, 3568, 3572, 3573, 3575, 3576, 3577, 3579, 3580, 3581, 3583, 3584, 3585, 3587, 3588, 3589, 3591, 3592, 3593, 3595, 3596, 3597, 3599, 3600, 3601, 3603, 3604, 3605, 3607, 3608, 3609, 3611, 3612, 3613, 3615, 3616, 3617, 3619, 3620, 3621, 3623, 3624, 3625, 3627, 3628, 3629, 3631, or 3632. The PBS can be, for example, 5 to 19 nucleotides in length and can comprise the sequence corresponding to any one of sequence numbers 3546, 3547, 3548, 3549, 3550, 3551, 3552, 3553, 3554, 3555, 3556, 3557, 3558, 3559, or 3560.

[0306] The PEgRNA can comprise, from 5′ to 3′, the spacer, the gRNA core, the edit template, and the PBS. The 3′ end of the edit template can be contiguous with the 5′ end of the PBS. The PEgRNA can comprise multiple RNA molecules or can be a single RNA molecule. Exemplary PEgRNAs provided in Table 11 can comprise a sequence corresponding to any one of sequence numbers 3639 to 4480. Any PEgRNA exemplified in Table 11 may comprise, or further comprise, a 3′ motif at the 3′ end of the extension arm, for example, a hairpin-forming motif or a series of 1, 2, 3, 4, 5, 6, 7 or more U nucleotides. In some embodiments, the PEgRNA comprises 4 U nucleotides at its 3′ end. Without being bound by theory, such 3′ motifs are believed to increase PEgRNA stability. The PEgRNA may alternatively or additionally comprise one or more chemical modifications, such as phosphorothioate (PS) bond(s), 2′-O-methylated (2′-Ome) nucleotides, or a combination thereof. In some embodiments, the PEgRNA comprise 3′ mN*mN*mN*N and 5′mN*mN*mN* modifications, where m indicates that the nucleotide contains a 2′-O-Me modification and a * indicates the presence of a phosphorothioate bond. PEgRNA sequences exemplified in Table 11 may alternatively be adapted for expression from a DNA template, for example, by including a 5′ terminal G if the spacer of the PEgRNA begins with another nucleotide, by including 6 or 7 U nucleotides at the 3′ end of the extension arm, or both. Such expression-adapted sequences may further comprise a hairpin-forming motif between the PBS and the 3′ terminal U series.

[0307] Any of the PEgRNAs of Table 11 can be used in a Prime Editing system further comprising a nick guide RNA (ngRNA). Such ngRNA can comprise a spacer comprising at its 3′ end a sequence corresponding to nucleotides 4-20 of any ngRNA spacer listed in Table 11 and a gRNA core capable of complexing with a Cas9 protein. For example, the sequence in the spacer of the ngRNA can comprise nucleotides 4-20, 3-20, 2-20, or 1-20 of sequence number 30, 33, 34, 3633, 1712, 3634, 3635, 35, 282, 36, 37, 1713, 38, 39, 40, 41, 42, 43, 44, 3636, 1717, 3637, 3638, 45, 46, 48, 49, 50, 51, 52, or 54. In some embodiments, the spacer of the ngRNA is a ngRNA spacer listed in Table 11. The ngRNA spacers in Table 11 are annotated with their PAM sequences, enabling selection of an appropriate Cas9 protein. It can be advantageous to select a ngRNA spacer that has a PAM sequence compatible with the Cas9 protein used in the Prime Editor, thus avoiding the need to use two different Cas9 proteins. The ngRNA is capable of directing a complexed Cas9 protein to bind the edit strand of the USH2a gene; thus, a complexed Cas9 nickase containing a nuclease inactivating mutation in the HNH domain will nick the non-edit strand. A PE3 ngRNA spacer has perfect complementarity to the edit strand both pre- and post-edit; a PE3b ngRNA spacer has perfect complementarity to the edit strand post-edit. A PE3 or PE3b ngRNA spacer in Table 11 annotated with the same * and number code as an RTT in Table 11 has perfect complementarity to the edit strand post-edit by a PEgRNA containing the RTT.

[0308] Table 12 provides Prime Editing guide RNAs (PEgRNAs) that can be used with any Prime Editor containing a Cas9 protein capable of recognizing a TG or TGTAGT PAM sequence. The PEgRNAs of Table 12 can also be used in Prime Editing systems further comprising a nick guide RNA (ngRNA). Such PEgRNAs and Prime Editing systems can be used, for example, to correct a c.2299delG mutation in USH2a. Some PEgRNAs in Table 12 can also be used to correct a c.2276 G->T mutation in USH2a.

[0309] The PEgRNAs exemplified in Table 12 comprise: (a) a spacer comprising at its 3′ end a sequence corresponding to sequence number 400; (b) a gRNA core capable of complexing with a Cas9 protein, and (c) an extension arm comprising: (i) an editing template at least 10 nucleotides in length and comprising at its 3′ end a sequence corresponding to sequence number 5936, and (ii) a prime binding site (PBS) comprising at its 5′ end a sequence corresponding to sequence number 5917. The PEgRNA spacer can be, for example, 17-22 nucleotides in length and can comprise the sequence corresponding to any one of sequence numbers 400, 5932, 5933, 45, 5934, 5935. In some embodiments, the PEgRNA spacer comprises sequence number 45. The PEgRNA spacers in Table 12 are annotated with their PAM sequence(s), enabling the selection of an appropriate Cas9 protein. The editing template can be referred to as a reverse transcription template (RTT). The editing template can encode wildtype USH2a gene sequence. For example, the editing template can comprise at its 3′ end the sequence corresponding to sequence number 5936, 5937, 5938, 5939, 5940, 5941, 5942, 5943, 5944, 5945, 5946, 5947, 5948, 5949, 5950, 5951, 5952, 5953, 5954, 5955, 5956, 5957, 5958, 5959, 5960, 5961, 5962, 5963, 5964, 5965, or 5966. The PBS can be, for example, 5 to 19 nucleotides in length and can comprise the sequence corresponding to any one of sequence numbers 5917, 5918, 5919, 5920, 5921, 5922, 5923, 5924, 5925, 5926, 5927, 5928, 5929, 5930, or 5931. The PEgRNA can comprise, from 5′ to 3′, the spacer, the gRNA core, the edit template, and the PBS. The 3′ end of the edit template can be contiguous with the 5′ end of the PBS. The PEgRNA can comprise multiple RNA molecules or can be a single RNA molecule.

[0310] Any of the PEgRNAs of Table 12 can be used in a Prime Editing system further comprising a nick guide RNA (ngRNA). Such ngRNA can comprise a spacer comprising at its 3′ end a sequence corresponding to nucleotides 4-20 of any ngRNA spacer listed in Table 12 and a gRNA core capable of complexing with a Cas9 protein. For example, the sequence in the spacer of the ngRNA can comprise nucleotides 4-20, 3-20, 2-20, or 1-20 of sequence number 376, 4, 5971, 4510, 378, 5972, 4634, 4635, 1676, 646, 4639, 3564, 5973, 1736, 4640, 5974, 380, 1324, 381, or 5975. In some embodiments, the spacer of the ngRNA is a ngRNA spacer listed in Table 12. The ngRNA spacers in Table 12 are annotated with their PAM sequences, enabling selection of an appropriate Cas9 protein. It can be advantageous to select a ngRNA spacer that has a PAM sequence compatible with the Cas9 protein used in the Prime Editor, thus avoiding the need to use two different Cas9 proteins. The ngRNA is capable of directing a complexed Cas9 protein to bind the edit strand of the USH2a gene; thus, a complexed Cas9 nickase containing a nuclease inactivating mutation in the HNH domain will nick the non-edit strand. A PE3 ngRNA spacer has perfect complementarity to the edit strand both pre- and post-edit; a PE3b ngRNA spacer has perfect complementarity to the edit strand post-edit. Exemplary ngRNA provided in Table 12 can comprise a sequence corresponding to sequence number 5967, 4632, 4505, 5968, 5969, 4633, 4507, or 5970.

[0311] Table 13 provides Prime Editing guide RNAs (PEgRNAs) that can be used with any Prime Editor containing a Cas9 protein capable of recognizing a GG or GGG PAM sequence. The PEgRNAs of Table 13 can also be used in Prime Editing systems further comprising a nick guide RNA (ngRNA). Such PEgRNAs and Prime Editing systems can be used, for example, to correct a c.2299delG mutation in USH2a.

[0312] The PEgRNAs exemplified in Table 13 comprise: (a) a spacer comprising at its 3′ end a sequence corresponding to sequence number 6027; (b) a gRNA core capable of complexing with a Cas9 protein, and (c) an extension arm comprising: (i) an editing template at least 14 nucleotides in length and comprising at its 3′ end a sequence corresponding to any one of sequence numbers 6032, 6033, 6038, or 6041, and (ii) a prime binding site (PBS) comprising at its 5′ end a sequence corresponding to sequence number 6013. The PEgRNA spacer can be, for example, 17-22 nucleotides in length and can comprise the sequence corresponding to any one of sequence numbers 6027, 6028, 6029, 33, 6030, or 6031. In some embodiments, the PEgRNA spacer comprises sequence number 33. The PEgRNA spacers in Table 13 are annotated with their PAM sequence(s), enabling the selection of an appropriate Cas9 protein. The editing template can be referred to as a reverse transcription template (RTT). The editing template can encode wildtype USH2a gene sequence. For example, the editing template can comprise at its 3′ end the sequence corresponding to sequence number 6032, 6034, 6036, 6039, 6043, 6047, 6051, 6055, 6059, 6063, 6067, 6071, 6075, 6079, 6083, 6087, 6091, 6099, 6095, 6103, 6107, 6111, 6115, 6119, 6123, 6127, or 6131. Alternatively, the editing template can encode one or more synonymous mutations relative to the wildtype USH2A gene. The editing template can encode one or more synonymous mutations that are PAM silencing mutations and can comprise at its 3′ end the sequence corresponding to sequence number 6033, 6035, 6037, 6038, 6040, 6041, 6042, 6044, 6045, 6046, 6048, 6049, 6050, 6052, 6053, 6054, 6056, 6057, 6058, 6060, 6061, 6062, 6064, 6065, 6066, 6068, 6069, 6070, 6072, 6073, 6074, 6076, 6077, 6078, 6080, 6081, 6082, 6084, 6085, 6086, 6088, 6089, 6090, 6092, 6093, 6094, 6096, 6097, 6098, 6100, 6101, 6102, 6104, 6105, 6106, 6108, 6109, 6110, 6112, 6113, 6114, 6116, 6117, 6118, 6120, 6121, 6122, 6124, 6125, 6126, 6128, 6129, 6130, 6132, or 6133. The PBS can be, for example, 5 to 19 nucleotides in length and can comprise the sequence corresponding to any one of sequence numbers 6013, 6014, 6015, 6016, 6017, 6018, 6019, 6020, 6021, 6022, 324, 6023, 6024, 6025, or 6026.

[0313] The PEgRNA can comprise, from 5′ to 3′, the spacer, the gRNA core, the edit template, and the PBS. The 3′ end of the edit template can be contiguous with the 5′ end of the PBS. The PEgRNA can comprise multiple RNA molecules or can be a single RNA molecule. Exemplary PEgRNAs provided in Table 13 can comprise a sequence corresponding to any one of sequence numbers 6139 to 7068. Any PEgRNA exemplified in Table 13 may comprise, or further comprise, a 3′ motif at the 3′ end of the extension arm, for example, a hairpin-forming motif or a series of 1, 2, 3, 4, 5, 6, 7 or more U nucleotides. In some embodiments, the PEgRNA comprises 4 U nucleotides at its 3′ end. Without being bound by theory, such 3′ motifs are believed to increase PEgRNA stability. The PEgRNA may alternatively or additionally comprise one or more chemical modifications, such as phosphorothioate (PS) bond(s), 2′-O-methylated (2′-Ome) nucleotides, or a combination thereof. In some embodiments, the PEgRNA comprise 3′ mN*mN*mN*N and 5′mN*mN*mN* modifications, where m indicates that the nucleotide contains a 2′-O-Me modification and a * indicates the presence of a phosphorothioate bond. PEgRNA sequences exemplified in Table 13 may alternatively be adapted for expression from a DNA template, for example, by including a 5′ terminal G if the spacer of the PEgRNA begins with another nucleotide, by including 6 or 7 U nucleotides at the 3′ end of the extension arm, or both. Such expression-adapted sequences may further comprise a hairpin-forming motif between the PBS and the 3′ terminal U series.

[0314] Any of the PEgRNAs of Table 13 can be used in a Prime Editing system further comprising a nick guide RNA (ngRNA). Such ngRNA can comprise a spacer comprising at its 3′ end a sequence corresponding to nucleotides 4-20 of any ngRNA spacer listed in Table 13 and a gRNA core capable of complexing with a Cas9 protein. For example, the sequence in the spacer of the ngRNA can comprise nucleotides 4-20, 3-20, 2-20, or 1-20 of sequence number 4, 5971, 4510, 6136, 2008, 6137, 6138, 5972, 4634, 4635, 1676, 646, 4639, 3564, 5973, 1736, 4640, 2090, 380, 1098, 1324, or 5975. In some embodiments, the spacer of the ngRNA is a ngRNA spacer listed in Table 13. The ngRNA spacers in Table 13 are annotated with their PAM sequences, enabling selection of an appropriate Cas9 protein. It can be advantageous to select a ngRNA spacer that has a PAM sequence compatible with the Cas9 protein used in the Prime Editor, thus avoiding the need to use two different Cas9 proteins. The ngRNA is capable of directing a complexed Cas9 protein to bind the edit strand of the USH2a gene; thus, a complexed Cas9 nickase containing a nuclease inactivating mutation in the HNH domain will nick the non-edit strand. A PE3 ngRNA spacer has perfect complementarity to the edit strand both pre- and post-edit; a PE3b ngRNA spacer has perfect complementarity to the edit strand post-edit. A PE3 or PE3b ngRNA spacer in Table 13 annotated with the same * and number code as an RTT in Table 13 has perfect complementarity to the edit strand post-edit by a PEgRNA containing the RTT. Exemplary ngRNA provided in Table 13 can comprise a sequence corresponding to sequence number 5967, 4504, 6134, 4632, 4505, 5968, 5969, 4506, 6135, 4633, 4507, or 5970.

[0315] Table 14 provides Prime Editing guide RNAs (PEgRNAs) that can be used with any Prime Editor containing a Cas9 protein capable of recognizing a TG or TGCAAT PAM sequence. The PEgRNAs of Table 14 can also be used in Prime Editing systems further comprising a nick guide RNA (ngRNA). Such PEgRNAs and Prime Editing systems can be used, for example, to correct a c.2299delG mutation in USH2a. The PEgRNAs in Table 14 can also be used to correct a c.2276 G->T mutation in USH2a.

[0316] The PEgRNAs exemplified in Table 14 comprise: (a) a spacer comprising at its 3′ end a sequence corresponding to sequence number 296; (b) a gRNA core capable of complexing with a Cas9 protein, and (c) an extension arm comprising: (i) an editing template at least 32 nucleotides in length and comprising at its 3′ end a sequence corresponding to any one of sequence numbers 358 or 359, and (ii) a prime binding site (PBS) comprising at its 5′ end a sequence corresponding to sequence number 301. The PEgRNA spacer can be, for example, 17-22 nucleotides in length and can comprise the sequence corresponding to any one of sequence numbers 296, 297, 298, 282, 299, or 300. In some embodiments, the PEgRNA spacer comprises sequence number 282. The PEgRNA spacers in Table 14 are annotated with their PAM sequence(s), enabling the selection of an appropriate Cas9 protein. The editing template can be referred to as a reverse transcription template (RTT). The editing template can encode wildtype USH2a gene sequence. For example, the editing template can comprise at its 3′ end the sequence corresponding to sequence number 358, 360, 362, 364, 366, 368, 370, 372, or 374. Alternatively, the editing template can encode one or more synonymous mutations relative to the wildtype USH2A gene. The editing template can encode one or more synonymous mutations that are PAM silencing mutations and can comprise at its 3′ end the sequence corresponding to sequence number 359, 361, 363, 365, 367, 369, 371, 373, or 375. The PBS can be, for example, 5 to 19 nucleotides in length and can comprise the sequence corresponding to any one of sequence numbers 301, 302, 303, 304, 305, 306, 307, 308, 309, 310, 311, 312, 313, 314, or 315. The PEgRNA can comprise, from 5′ to 3′, the spacer, the gRNA core, the edit template, and the PBS. The 3′ end of the edit template can be contiguous with the 5′ end of the PBS. The PEgRNA can comprise multiple RNA molecules or can be a single RNA molecule.

[0317] Any of the PEgRNAs of Table 14 can be used in a Prime Editing system further comprising a nick guide RNA (ngRNA). Such ngRNA can comprise a spacer comprising at its 3′ end a sequence corresponding to nucleotides 4-20 of any ngRNA spacer listed in Table 14 and a gRNA core capable of complexing with a Cas9 protein. For example, the sequence in the spacer of the ngRNA can comprise nucleotides 4-20, 3-20, 2-20, or 1-20 of sequence number 376, 4, 58, 1898, 144, 377, 4509, 4510, 378, 2008, 4634, 4635, 1676, 4519, 646, 379, 4639, 3564, 5973, 1736, 4640, 2090, 380, 1098, 1324, or 381. In some embodiments, the spacer of the ngRNA is a ngRNA spacer listed in Table 14. The ngRNA spacers in Table 14 are annotated with their PAM sequences, enabling selection of an appropriate Cas9 protein. It can be advantageous to select a ngRNA spacer that has a PAM sequence compatible with the Cas9 protein used in the Prime Editor, thus avoiding the need to use two different Cas9 proteins. The ngRNA is capable of directing a complexed Cas9 protein to bind the edit strand of the USH2a gene; thus, a complexed Cas9 nickase containing a nuclease inactivating mutation in the HNH domain will nick the non-edit strand. A PE3 ngRNA spacer has perfect complementarity to the edit strand both pre- and post-edit; a PE3b ngRNA spacer has perfect complementarity to the edit strand post-edit. A PE3 or PE3b ngRNA spacer in Table 14 annotated with the same * and number code as an RTT in Table 14 has perfect complementarity to the edit strand post-edit by a PEgRNA containing the RTT. Exemplary ngRNA provided in Table 14 can comprise a sequence corresponding to sequence number 4504, 4632, 4505, 4506, 4633, or 4507.

[0318] Table 15 provides Prime Editing guide RNAs (PEgRNAs) that can be used with any Prime Editor containing a Cas9 protein capable of recognizing a TG, TGG, or TGGG PAM sequence. The PEgRNAs of Table 15 can also be used in Prime Editing systems further comprising a nick guide RNA (ngRNA). Such PEgRNAs and Prime Editing systems can be used, for example, to correct a c.2299delG mutation in USH2a.

[0319] The PEgRNAs exemplified in Table 15 comprise: (a) a spacer comprising at its 3′ end a sequence corresponding to sequence number 2099; (b) a gRNA core capable of complexing with a Cas9 protein, and (c) an extension arm comprising: (i) an editing template at least 15, 16, 17, or 18 nucleotides in length and comprising at its 3′ end a sequence corresponding to any one of sequence numbers 7108, 7110, 7111, or 7112, and (ii) a prime binding site (PBS) comprising at its 5′ end a sequence corresponding to sequence number 7094. The PEgRNA spacer can be, for example, 17-22 nucleotides in length and can comprise the sequence corresponding to any one of sequence numbers 2099, 2103, 2107, 30, 2114, or 2118. In some embodiments, the PEgRNA spacer comprises sequence number 30. The PEgRNA spacers in Table 15 are annotated with their PAM sequence(s), enabling the selection of an appropriate Cas9 protein. The editing template can be referred to as a reverse transcription template (RTT). The editing template can encode wildtype USH2a gene sequence. For example, the editing template can comprise at its 3′ end the sequence corresponding to sequence number 7108, 7109, 2087, 2088, 2089, 2090, 2091, 2092, 7126, 7130, 7134, 7138, 7142, 7146, 7150, 7154, 7158, 7162, 7166, 7170, 7174, 7178, 7182, 7186, 7190, or 7194. Alternatively, the editing template can encode one or more synonymous mutations relative to the wildtype USH2A gene. The editing template can encode one or more synonymous mutations that are PAM silencing mutations and can comprise at its 3′ end the sequence corresponding to sequence number 7110, 7111, 7112, 7113, 7114, 7115, 7116, 7117, 7118, 7119, 7120, 7121, 7122, 7123, 7124, 7125, 7127, 7128, 7129, 7131, 7133, 7132, 7135, 7136, 7137, 7139, 7140, 7141, 7143, 7144, 7145, 7147, 7148, 7149, 7151, 7152, 7153, 7155, 7156, 7157, 7159, 7160, 7161, 7163, 7164, 7165, 7167, 7169, 7168, 7171, 7172, 7173, 7175, 7176, 7177, 7179, 7180, 7181, 7183, 7184, 7185, 7187, 7188, 7189, 7191, 7192, 7193, 7195, or 7196. The PBS can be, for example, 5 to 19 nucleotides in length and can comprise the sequence corresponding to any one of sequence numbers 7094, 7095, 7096, 7097, 7098, 7099, 7100, 7101, 7102, 322, 7103, 7104, 7105, 7106, or 7107.

[0320] The PEgRNA can comprise, from 5′ to 3′, the spacer, the gRNA core, the edit template, and the PBS. The 3′ end of the edit template can be contiguous with the 5′ end of the PBS. The PEgRNA can comprise multiple RNA molecules or can be a single RNA molecule. Exemplary PEgRNAs provided in Table 15 can comprise a sequence corresponding to any one of sequence numbers 7200 to 7225. Any PEgRNA exemplified in Table 15 may comprise, or further comprise, a 3′ motif at the 3′ end of the extension arm, for example, a hairpin-forming motif or a series of 1, 2, 3, 4, 5, 6, 7 or more U nucleotides. In some embodiments, the PEgRNA comprises 4 U nucleotides at its 3′ end. Without being bound by theory, such 3′ motifs are believed to increase PEgRNA stability. The PEgRNA may alternatively or additionally comprise one or more chemical modifications, such as phosphorothioate (PS) bond(s), 2′-O-methylated (2′-Ome) nucleotides, or a combination thereof. In some embodiments, the PEgRNA comprise 3′ mN*mN*mN*N and 5′mN*mN*mN* modifications, where m indicates that the nucleotide contains a 2′-O-Me modification and a * indicates the presence of a phosphorothioate bond. PEgRNA sequences exemplified in Table 15 may alternatively be adapted for expression from a DNA template, for example, by including a 5′ terminal G if the spacer of the PEgRNA begins with another nucleotide, by including 6 or 7 U nucleotides at the 3′ end of the extension arm, or both. Such expression-adapted sequences may further comprise a hairpin-forming motif between the PBS and the 3′ terminal U series.

[0321] Any of the PEgRNAs of Table 15 can be used in a Prime Editing system further comprising a nick guide RNA (ngRNA). Such ngRNA can comprise a spacer comprising at its 3′ end a sequence corresponding to nucleotides 4-20 of any ngRNA spacer listed in Table 15 and a gRNA core capable of complexing with a Cas9 protein. For example, the sequence in the spacer of the ngRNA can comprise nucleotides 4-20, 3-20, 2-20, or 1-20 of sequence number 4, 5971, 667, 1898, 1079, 4510, 1657, 2008, 5972, 4634, 4635, 1676, 646, 7197, 379, 7198, 7199, 4639, 3564, 5973, 1736, 4640, 2090, 380, 1098, 1324, or 5975. In some embodiments, the spacer of the ngRNA is a ngRNA spacer listed in Table 15. The ngRNA spacers in Table 15 are annotated with their PAM sequences, enabling selection of an appropriate Cas9 protein. It can be advantageous to select a ngRNA spacer that has a PAM sequence compatible with the Cas9 protein used in the Prime Editor, thus avoiding the need to use two different Cas9 proteins. The ngRNA is capable of directing a complexed Cas9 protein to bind the edit strand of the USH2a gene; thus, a complexed Cas9 nickase containing a nuclease inactivating mutation in the HNH domain will nick the non-edit strand. A PE3 ngRNA spacer has perfect complementarity to the edit strand both pre- and post-edit; a PE3b ngRNA spacer has perfect complementarity to the edit strand post-edit. A PE3 or PE3b ngRNA spacer in Table 15 annotated with the same * and number code as an RTT in Table 15 has perfect complementarity to the edit strand post-edit by a PEgRNA containing the RTT. Exemplary ngRNA provided in Table 15 can comprise a sequence corresponding to sequence number 5967, 4504, 4632, 4505, 5968, 5969, 4506, 4633, 4507, or 5970.

[0322] Table 16 provides Prime Editing guide RNAs (PEgRNAs) that can be used with any Prime Editor containing a Cas9 protein capable of recognizing a TG PAM sequence. The PEgRNAs of Table 16 can also be used in Prime Editing systems further comprising a nick guide RNA (ngRNA). Such PEgRNAs and Prime Editing systems can be used, for example, to correct a c.2299delG mutation in USH2a.

[0323] The PEgRNAs exemplified in Table 16 comprise: (a) a spacer comprising at its 3′ end a sequence corresponding to sequence number 7240; (b) a gRNA core capable of complexing with a Cas9 protein, and (c) an extension arm comprising: (i) an editing template at least 6 nucleotides in length and comprising at its 3′ end a sequence corresponding to any one of sequence numbers 7246, and (ii) a prime binding site (PBS) comprising at its 5′ end a sequence corresponding to sequence number 7226. The PEgRNA spacer can be, for example, 17-22 nucleotides in length and can comprise the sequence corresponding to any one of sequence numbers 7240, 7241, 7242, 7243, 7244, or 7245. In some embodiments, the PEgRNA spacer comprises sequence number 7243. The PEgRNA spacers in Table 16 are annotated with their PAM sequence(s), enabling the selection of an appropriate Cas9 protein. The editing template can be referred to as a reverse transcription template (RTT). The editing template can encode wildtype USH2a gene sequence. For example, the editing template can comprise at its 3′ end the sequence corresponding to sequence number 7246 to 7280. The PBS can be, for example, 5 to 19 nucleotides in length and can comprise the sequence corresponding to any one of sequence numbers 7226, 7227, 7228, 7229, 7230, 7231, 7232, 7233, 7234, 7235, 7236, 7237, 7238, 7239, or 57. The PEgRNA can comprise, from 5′ to 3′, the spacer, the gRNA core, the edit template, and the PBS. The 3′ end of the edit template can be contiguous with the 5′ end of the PBS. The PEgRNA can comprise multiple RNA molecules or can be a single RNA molecule.

[0324] Any of the PEgRNAs of Table 16 can be used in a Prime Editing system further comprising a nick guide RNA (ngRNA). Such ngRNA can comprise a spacer comprising at its 3′ end a sequence corresponding to nucleotides 4-20 of any ngRNA spacer listed in Table 16 and a gRNA core capable of complexing with a Cas9 protein. For example, the sequence in the spacer of the ngRNA can comprise nucleotides 4-20, 3-20, 2-20, or 1-20 of sequence number 4, 5971, 4510, 5972, 4634, 4635, 1676, 646, 4639, 3564, 5973, 1736, 4640, 380, or 5975. In some embodiments, the spacer of the ngRNA is a ngRNA spacer listed in Table 16. The ngRNA spacers in Table 16 are annotated with their PAM sequences, enabling selection of an appropriate Cas9 protein. It can be advantageous to select a ngRNA spacer that has a PAM sequence compatible with the Cas9 protein used in the Prime Editor, thus avoiding the need to use two different Cas9 proteins. Exemplary ngRNA provided in Table 16 can comprise a sequence corresponding to sequence number 5967, 4632, 4505, 5968, 5969, 4633, 4507, or 5970.

[0325] Table 17 provides Prime Editing guide RNAs (PEgRNAs) that can be used with any Prime Editor containing a Cas9 protein capable of recognizing a GG or GGCAGT PAM sequence. The PEgRNAs of Table 17 can also be used in Prime Editing systems further comprising a nick guide RNA (ngRNA). Such PEgRNAs and Prime Editing systems can be used, for example, to correct a c.2299delG mutation in USH2a.

[0326] The PEgRNAs exemplified in Table 17 comprise: (a) a spacer comprising at its 3′ end a sequence corresponding to sequence number 1102; (b) a gRNA core capable of complexing with a Cas9 protein, and (c) an extension arm comprising: (i) an editing template at least 13 nucleotides in length and comprising at its 3′ end a sequence corresponding to any one of sequence numbers 7295, 7298, 7300, or 7301, and (ii) a prime binding site (PBS) comprising at its 5′ end a sequence corresponding to sequence number 7281. The PEgRNA spacer can be, for example, 17-22 nucleotides in length and can comprise the sequence corresponding to any one of sequence numbers 1102, 1103, 1104, 36, 1107, or 1109. In some embodiments, the PEgRNA spacer comprises sequence number 36. The PEgRNA spacers in Table 17 are annotated with their PAM sequence(s), enabling the selection of an appropriate Cas9 protein. The editing template can be referred to as a reverse transcription template (RTT). The editing template can encode wildtype USH2a gene sequence. For example, the editing template can comprise at its 3′ end the sequence corresponding to sequence number 7295, 7296, 7297, 7299, 1095, 1096, 1097, 1098, 1099, 1100, 7321, 7325, 7329, 7333, 7337, 7341, 7345, 7349, 7353, 7357, 7361, 7365, 7369, 7373, 7377, 7381, 7385, or 7389. Alternatively, the editing template can encode one or more synonymous mutations relative to the wildtype USH2A gene. The editing template can encode one or more synonymous mutations that are PAM silencing mutations and can comprise at its 3′ end the sequence corresponding to sequence number 7298, 7300, 7301, 7302, 7303, 7304, 7305, 7306, 7307, 7308, 7309, 7310, 7311, 7312, 7313, 7314, 7315, 7316, 7317, 7318, 7319, 7320, 7322, 7323, 7324, 7326, 7327, 7328, 7330, 7331, 7332, 7334, 7335, 7336, 7338, 7339, 7340, 7342, 7343, 7344, 7346, 7347, 7348, 7350, 7351, 7352, 7354, 7355, 7356, 7358, 7359, 7360, 7362, 7363, 7364, 7366, 7367, 7368, 7370, 7371, 7372, 7374, 7375, 7376, 7378, 7379, 7380, 7382, 7383, 7384, 7386, 7387, 7388, 7390, or 7391. The PBS can be, for example, 5 to 19 nucleotides in length and can comprise the sequence corresponding to any one of sequence numbers 7281, 7282, 7283, 7284, 7285, 7286, 7287, 7288, 7289, 7290, 7291, 326, 7292, 7293, or 7294. The PEgRNA can comprise, from 5′ to 3′, the spacer, the gRNA core, the edit template, and the PBS. The 3′ end of the edit template can be contiguous with the 5′ end of the PBS. The PEgRNA can comprise multiple RNA molecules or can be a single RNA molecule.

[0327] Any of the PEgRNAs of Table 17 can be used in a Prime Editing system further comprising a nick guide RNA (ngRNA). Such ngRNA can comprise a spacer comprising at its 3′ end a sequence corresponding to nucleotides 4-20 of any ngRNA spacer listed in Table 17 and a gRNA core capable of complexing with a Cas9 protein. For example, the sequence in the spacer of the ngRNA can comprise nucleotides 4-20, 3-20, 2-20, or 1-20 of sequence number 376, 4, 5971, 4510, 378, 5972, 4634, 4635, 1676, 646, 379, 4639, 3564, 5973, 1736, 4640, 5974, 7116, 2090, 7117, 7118, 380, 7311, 1098, 7312, 7313, 7392, 1324, 7393, 7394, 381, or 5975. In some embodiments, the spacer of the ngRNA is a ngRNA spacer listed in Table 17. The ngRNA spacers in Table 17 are annotated with their PAM sequences, enabling selection of an appropriate Cas9 protein. It can be advantageous to select a ngRNA spacer that has a PAM sequence compatible with the Cas9 protein used in the Prime Editor, thus avoiding the need to use two different Cas9 proteins. The ngRNA is capable of directing a complexed Cas9 protein to bind the edit strand of the USH2a gene; thus, a complexed Cas9 nickase containing a nuclease inactivating mutation in the HNH domain will nick the non-edit strand. A PE3 ngRNA spacer has perfect complementarity to the edit strand both pre- and post-edit; a PE3b ngRNA spacer has perfect complementarity to the edit strand post-edit. A PE3 or PE3b ngRNA spacer in Table 17 annotated with the same * and number code as an RTT in Table 17 has perfect complementarity to the edit strand post-edit by a PEgRNA containing the RTT. Exemplary ngRNA provided in Table 17 can comprise a sequence corresponding to sequence number 5967, 4632, 4505, 5968, 5969, 4633, 4507, or 5970.

[0328] Table 18 provides Prime Editing guide RNAs (PEgRNAs) that can be used with any Prime Editor containing a Cas9 protein capable of recognizing an AG PAM sequence. The PEgRNAs of Table 18 can also be used in Prime Editing systems further comprising a nick guide RNA (ngRNA). Such PEgRNAs and Prime Editing systems can be used, for example, to correct a c.2299delG mutation in USH2a.

[0329] The PEgRNAs exemplified in Table 18 comprise: (a) a spacer comprising at its 3′ end a sequence corresponding to sequence number 73; (b) a gRNA core capable of complexing with a Cas9 protein, and (c) an extension arm comprising: (i) an editing template at least 8 nucleotides in length and comprising at its 3′ end a sequence corresponding to sequence number 7412, and (ii) a prime binding site (PBS) comprising at its 5′ end a sequence corresponding to sequence number 7395. The PEgRNA spacer can be, for example, 17-22 nucleotides in length and can comprise the sequence corresponding to any one of sequence numbers 73, 7408, 161, 7409, 7410, or 7411. In some embodiments, the PEgRNA spacer comprises sequence number 7409. The PEgRNA spacers in Table 18 are annotated with their PAM sequence(s), enabling the selection of an appropriate Cas9 protein. The editing template can be referred to as a reverse transcription template (RTT). The editing template can encode wildtype USH2a gene sequence. For example, the editing template can comprise at its 3′ end the sequence corresponding to sequence number 7412, 7413, 7414, 7415, 7416, 7417, 7418, 7419, 7420, 7421, 7422, 7423, 7424, 7425, 7426, 7427, 7428, 7429, 7430, 7431, 7432, 7433, 7434, 7435, 7436, 7437, 7438, 7439, 7440, 7441, 7442, 7443, or 7444. The PBS can be, for example, 5 to 19 nucleotides in length and can comprise the sequence corresponding to any one of sequence numbers 7395, 7396, 7397, 7398, 7399, 7400, 7401, 7402, 7403, 7404, 7405, 7406, 55, 7407, or 143. The PEgRNA can comprise, from 5′ to 3′, the spacer, the gRNA core, the edit template, and the PBS. The 3′ end of the edit template can be contiguous with the 5′ end of the PBS. The PEgRNA can comprise multiple RNA molecules or can be a single RNA molecule.

[0330] Any of the PEgRNAs of Table 18 can be used in a Prime Editing system further comprising a nick guide RNA (ngRNA). Such ngRNA can comprise a spacer comprising at its 3′ end a sequence corresponding to nucleotides 4-20 of any ngRNA spacer listed in Table 18 and a gRNA core capable of complexing with a Cas9 protein. For example, the sequence in the spacer of the ngRNA can comprise nucleotides 4-20, 3-20, 2-20, or 1-20 of sequence number 4, 5971, 4510, 5972, 4634, 4635, 1676, 646, 4639, 3564, 5973, 1736, 4640, 380, or 5975. In some embodiments, the spacer of the ngRNA is a ngRNA spacer listed in Table 18. The ngRNA spacers in Table 18 are annotated with their PAM sequences, enabling selection of an appropriate Cas9 protein. It can be advantageous to select a ngRNA spacer that has a PAM sequence compatible with the Cas9 protein used in the Prime Editor, thus avoiding the need to use two different Cas9 proteins. The ngRNA is capable of directing a complexed Cas9 protein to bind the edit strand of the USH2a gene; thus, a complexed Cas9 nickase containing a nuclease inactivating mutation in the HNH domain will nick the non-edit strand. A PE3 ngRNA spacer has perfect complementarity to the edit strand both pre- and post-edit; a PE3b ngRNA spacer has perfect complementarity to the edit strand post-edit. Exemplary ngRNA provided in Table 18 can comprise a sequence corresponding to sequence number 5967, 4632, 4505, 5968, 5969, 4633, 4507, 5970.

[0331] Table 19 provides Prime Editing guide RNAs (PEgRNAs) that can be used with any Prime Editor containing a Cas9 protein capable of recognizing an AG PAM sequence. The PEgRNAs of Table 19 can also be used in Prime Editing systems further comprising a nick guide RNA (ngRNA). Such PEgRNAs and Prime Editing systems can be used, for example, to correct a c.2299delG mutation in USH2a.

[0332] The PEgRNAs exemplified in Table 19 comprise: (a) a spacer comprising at its 3′ end a sequence corresponding to sequence number 7459; (b) a gRNA core capable of complexing with a Cas9 protein, and (c) an extension arm comprising: (i) an editing template at least 10 nucleotides in length and comprising at its 3′ end a sequence corresponding to any one of sequence numbers 7461 or 7465, and (ii) a prime binding site (PBS) comprising at its 5′ end a sequence corresponding to sequence number 7445. The PEgRNA spacer can be, for example, 17-22 nucleotides in length and can comprise the sequence corresponding to any one of sequence numbers 7459, 7460, 1418, 42, 1420, or 1426. In some embodiments, the PEgRNA spacer comprises sequence number 42. The PEgRNA spacers in Table 19 are annotated with their PAM sequence(s), enabling the selection of an appropriate Cas9 protein. The editing template can be referred to as a reverse transcription template (RTT). The editing template can encode wildtype USH2a gene sequence. For example, the editing template can comprise at its 3′ end the sequence corresponding to sequence number 7461, 7462, 7463, 7464, 7466, 7468, 7470, 1412, 1413, 1414, 381, 1415, 1416, 7477, 7479, 7481, 7483, 7485, 7487, 7489, 7491, 7493, 7495, 7497, 7499, 7501, 7503, 7505, 7507, 7509, or 7511. Alternatively, the editing template can encode one or more synonymous mutations relative to the wildtype USH2A gene. The editing template can encode one or more synonymous mutations that are PAM silencing mutations and can comprise at its 3′ end the sequence corresponding to sequence number 7465, 7467, 7469, 7471, 7472, 7473, 7474, 1879, 7475, 7476, 7478, 7480, 7482, 7484, 7486, 7488, 7490, 7492, 7494, 7496, 7498, 7500, 7502, 7504, 7506, 7508, 7510, or 7512. The PBS can be, for example, 5 to 19 nucleotides in length and can comprise the sequence corresponding to any one of sequence numbers 7445, 7446, 7447, 7448, 7449, 7450, 7451, 7452, 7453, 7454, 7455, 7456, 7457, 7458, or 332. The PEgRNA can comprise, from 5′ to 3′, the spacer, the gRNA core, the edit template, and the PBS. The 3′ end of the edit template can be contiguous with the 5′ end of the PBS. The PEgRNA can comprise multiple RNA molecules or can be a single RNA molecule.

[0333] Any of the PEgRNAs of Table 19 can be used in a Prime Editing system further comprising a nick guide RNA (ngRNA). Such ngRNA can comprise a spacer comprising at its 3′ end a sequence corresponding to nucleotides 4-20 of any ngRNA spacer listed in Table 19 and a gRNA core capable of complexing with a Cas9 protein. For example, the sequence in the spacer of the ngRNA can comprise nucleotides 4-20, 3-20, 2-20, or 1-20 of sequence number 4, 5971, 4510, 5972, 4634, 4635, 1676, 646, 7513, 4639, 3564, 5973, 1736, 4640, 380, 1098, 7514, 1324, 1839, or 5975. In some embodiments, the spacer of the ngRNA is a ngRNA spacer listed in Table 19. The ngRNA spacers in Table 19 are annotated with their PAM sequences, enabling selection of an appropriate Cas9 protein. It can be advantageous to select a ngRNA spacer that has a PAM sequence compatible with the Cas9 protein used in the Prime Editor, thus avoiding the need to use two different Cas9 proteins. The ngRNA is capable of directing a complexed Cas9 protein to bind the edit strand of the USH2a gene; thus, a complexed Cas9 nickase containing a nuclease inactivating mutation in the HNH domain will nick the non-edit strand. A PE3 ngRNA spacer has perfect complementarity to the edit strand both pre- and post-edit; a PE3b ngRNA spacer has perfect complementarity to the edit strand post-edit. A PE3 or PE3b ngRNA spacer in Table 19 annotated with the same * and number code as an RTT in Table 19 has perfect complementarity to the edit strand post-edit by a PEgRNA containing the RTT. Exemplary ngRNA provided in Table 19 can comprise a sequence corresponding to sequence number 5967, 4632, 4505, 5968, 5969, 4633, 4507, or 5970.

[0334] Table 20 provides Prime Editing guide RNAs (PEgRNAs) that can be used with any Prime Editor containing a Cas9 protein capable of recognizing a TG PAM sequence. The PEgRNAs of Table 20 can also be used in Prime Editing systems further comprising a nick guide RNA (ngRNA). Such PEgRNAs and Prime Editing systems can be used, for example, to correct a c.2276 G->T mutation in USH2a. The PEgRNAs in Table 20 can also be used to correct a c.2299delG mutation in USH2a.

[0335] The PEgRNAs exemplified in Table 20 comprise: (a) a spacer comprising at its 3′ end a sequence corresponding to sequence number 1; (b) a gRNA core capable of complexing with a Cas9 protein, and (c) an extension arm comprising: (i) an editing template at least 37 nucleotides in length and comprising at its 3′ end a sequence corresponding to any one of sequence numbers 22 or 23, and (ii) a prime binding site (PBS) comprising at its 5′ end a sequence corresponding to sequence number 7. The PEgRNA spacer can be, for example, 17-22 nucleotides in length and can comprise the sequence corresponding to any one of sequence numbers 1, 2, 3, 4, 5, or 6. In some embodiments, the PEgRNA spacer comprises sequence number 4. The PEgRNA spacers in Table 20 are annotated with their PAM sequence(s), enabling the selection of an appropriate Cas9 protein. The editing template can be referred to as a reverse transcription template (RTT). The editing template can encode wildtype USH2a gene sequence. For example, the editing template can comprise at its 3′ end the sequence corresponding to sequence number 22, 24, 26, or 28. Alternatively, the editing template can encode one or more synonymous mutations relative to the wildtype USH2A gene. The editing template can encode one or more synonymous mutations that are PAM silencing mutations and can comprise at its 3′ end the sequence corresponding to sequence number 23, 25, 27, or 29. The PBS can be, for example, 5 to 19 nucleotides in length and can comprise the sequence corresponding to any one of sequence numbers 7, 8, 9, 10, 11, 12, 13, 14, 15, 16, 17, 18, 19, 20, or 21. The PEgRNA can comprise, from 5′ to 3′, the spacer, the gRNA core, the edit template, and the PBS. The 3′ end of the edit template can be contiguous with the 5′ end of the PBS. The PEgRNA can comprise multiple RNA molecules or can be a single RNA molecule.

[0336] Any of the PEgRNAs of Table 20 can be used in a Prime Editing system further comprising a nick guide RNA (ngRNA). Such ngRNA can comprise a spacer comprising at its 3′ end a sequence corresponding to nucleotides 4-20 of any ngRNA spacer listed in Table 20 and a gRNA core capable of complexing with a Cas9 protein. For example, the sequence in the spacer of the ngRNA can comprise nucleotides 4-20, 3-20, 2-20, or 1-20 of sequence number 30, 31, 32, 33, 34, 35, 36, 37, 38, 39, 40, 41, 42, 43, 44, 45, 46, 47, 48, 49, 50, 51, 52, 53, or 54. In some embodiments, the spacer of the ngRNA is a ngRNA spacer listed in Table 20. The ngRNA spacers in Table 20 are annotated with their PAM sequences, enabling selection of an appropriate Cas9 protein. It can be advantageous to select a ngRNA spacer that has a PAM sequence compatible with the Cas9 protein used in the Prime Editor, thus avoiding the need to use two different Cas9 proteins. The ngRNA is capable of directing a complexed Cas9 protein to bind the edit strand of the USH2a gene; thus, a complexed Cas9 nickase containing a nuclease inactivating mutation in the HNH domain will nick the non-edit strand. A PE3 ngRNA spacer has perfect complementarity to the edit strand both pre- and post-edit; a PE3b ngRNA spacer has perfect complementarity to the edit strand post-edit.

[0337] Table 21 provides Prime Editing guide RNAs (PEgRNAs) that can be used with any Prime Editor containing a Cas9 protein capable of recognizing a TG or TGA PAM sequence. The PEgRNAs of Table 21 can also be used in Prime Editing systems further comprising a nick guide RNA (ngRNA). Such PEgRNAs and Prime Editing systems can be used, for example, to correct a c.2276 G->T mutation in USH2a.

[0338] The PEgRNAs exemplified in Table 21 comprise: (a) a spacer comprising at its 3′ end a sequence corresponding to sequence number 55; (b) a gRNA core capable of complexing with a Cas9 protein, and (c) an extension arm comprising: (i) an editing template at least 10 nucleotides in length and comprising at its 3′ end a sequence corresponding to any one of sequence numbers 76 or 77, and (ii) a prime binding site (PBS) comprising at its 5′ end a sequence corresponding to sequence number 61. The PEgRNA spacer can be, for example, 17-22 nucleotides in length and can comprise the sequence corresponding to any one of sequence numbers 55, 56, 57, 58, 59, or 60. In some embodiments, the PEgRNA spacer comprises sequence number 58. The PEgRNA spacers in Table 21 are annotated with their PAM sequence(s), enabling the selection of an appropriate Cas9 protein. The editing template can be referred to as a reverse transcription template (RTT). The editing template can encode wildtype USH2a gene sequence. For example, the editing template can comprise at its 3′ end the sequence corresponding to sequence number 76, 78, 80, 82, 84, 86, 88, 90, 92, 94, 96, 98, 100, 102, 104, 106, 108, 110, 112, 114, 116, 118, 120, 122, 124, 126, 128, 130, 132, 134, or 136. Alternatively, the editing template can encode one or more synonymous mutations relative to the wildtype USH2A gene. The editing template can encode one or more synonymous mutations that are PAM silencing mutations and can comprise at its 3′ end the sequence corresponding to sequence number 77, 79, 81, 83, 85, 87, 89, 91, 93, 95, 97, 99, 101, 103, 105, 107, 109, 111, 113, 115, 117, 119, 121, 123, 125, 127, 129, 131, 133, 135, or 137. The PBS can be, for example, 5 to 19 nucleotides in length and can comprise the sequence corresponding to any one of sequence numbers 61, 62, 63, 64, 65, 66, 67, 68, 69, 70, 71, 72, 73, 74, or 75. The PEgRNA can comprise, from 5′ to 3′, the spacer, the gRNA core, the edit template, and the PBS. The 3′ end of the edit template can be contiguous with the 5′ end of the PBS. The PEgRNA can comprise multiple RNA molecules or can be a single RNA molecule.

[0339] Any of the PEgRNAs of Table 21 can be used in a Prime Editing system further comprising a nick guide RNA (ngRNA). Such ngRNA can comprise a spacer comprising at its 3′ end a sequence corresponding to nucleotides 4-20 of any ngRNA spacer listed in Table 21 and a gRNA core capable of complexing with a Cas9 protein. For example, the sequence in the spacer of the ngRNA can comprise nucleotides 4-20, 3-20, 2-20, or 1-20 of sequence number 31, 34, 138, 35, 139, 37, 38, 39, 41, 43, 44, 140, 48, 49, 51, 52, 53, 54. In some embodiments, the spacer of the ngRNA is a ngRNA spacer listed in Table 21. The ngRNA spacers in Table 21 are annotated with their PAM sequences, enabling selection of an appropriate Cas9 protein. It can be advantageous to select a ngRNA spacer that has a PAM sequence compatible with the Cas9 protein used in the Prime Editor, thus avoiding the need to use two different Cas9 proteins. The ngRNA is capable of directing a complexed Cas9 protein to bind the edit strand of the USH2a gene; thus, a complexed Cas9 nickase containing a nuclease inactivating mutation in the HNH domain will nick the non-edit strand. A PE3 ngRNA spacer has perfect complementarity to the edit strand both pre- and post-edit.

[0340] Table 22 provides Prime Editing guide RNAs (PEgRNAs) that can be used with any Prime Editor containing a Cas9 protein capable of recognizing an AAG or AAGAAT PAM sequence. The PEgRNAs of Table 22 can also be used in Prime Editing systems further comprising a nick guide RNA (ngRNA). Such PEgRNAs and Prime Editing systems can be used, for example, to correct a c.2276 G->T mutation in USH2a.

[0341] The PEgRNAs exemplified in Table 22 comprise: (a) a spacer comprising at its 3′ end a sequence corresponding to sequence number 141; (b) a gRNA core capable of complexing with a Cas9 protein, and (c) an extension arm comprising: (i) an editing template at least 8 nucleotides in length and comprising at its 3′ end a sequence corresponding to any one of sequence numbers 162, 165, 172, or 173, and (ii) a prime binding site (PBS) comprising at its 5′ end a sequence corresponding to sequence number 147. The PEgRNA spacer can be, for example, 17-22 nucleotides in length and can comprise the sequence corresponding to any one of sequence numbers 141, 142, 143, 144, 145, or 146. In some embodiments, the PEgRNA spacer comprises sequence number 144. The PEgRNA spacers in Table 22 are annotated with their PAM sequence(s), enabling the selection of an appropriate Cas9 protein. The editing template can be referred to as a reverse transcription template (RTT). The editing template can encode wildtype USH2a gene sequence. For example, the editing template can comprise at its 3′ end the sequence corresponding to sequence number 162, 163, 164, 166, 168, 170, 174, 178, 182, 186, 190, 194, 198, 202, 206, 210, 214, 218, 222, 226, 230, 234, 238, 242, 246, 250, 254, 258, 262, 266, 270, 274, or 278. Alternatively, the editing template can encode one or more synonymous mutations relative to the wildtype USH2A gene. The editing template can encode one or more synonymous mutations that are PAM silencing mutations and can comprise at its 3′ end the sequence corresponding to sequence number 165, 167, 169, 171, 172, 173, 175, 176, 177, 179, 180, 181, 183, 184, 185, 187, 188, 189, 191, 192, 193, 195, 196, 197, 199, 200, 201, 203, 204, 205, 207, 208, 209, 211, 212, 213, 215, 216, 217, 219, 220, 221, 223, 224, 225, 227, 228, 229, 231, 232, 233, 235, 236, 237, 239, 240, 241, 243, 244, 245, 247, 248, 249, 251, 252, 253, 255, 256, 257, 259, 260, 261, 263, 264, 265, 267, 268, 269, 271, 272, 273, 275, 276, 277, 279, 280, or 281. The PBS can be, for example, 5 to 19 nucleotides in length and can comprise the sequence corresponding to any one of sequence numbers 147, 148, 149, 150, 151, 152, 153, 154, 155, 156, 157, 158, 159, 160, or 161. The PEgRNA can comprise, from 5′ to 3′, the spacer, the gRNA core, the edit template, and the PBS. The 3′ end of the edit template can be contiguous with the 5′ end of the PBS. The PEgRNA can comprise multiple RNA molecules or can be a single RNA molecule.

[0342] Any of the PEgRNAs of Table 22 can be used in a Prime Editing system further comprising a nick guide RNA (ngRNA). Such ngRNA can comprise a spacer comprising at its 3′ end a sequence corresponding to nucleotides 4-20 of any ngRNA spacer listed in Table 22 and a gRNA core capable of complexing with a Cas9 protein. For example, the sequence in the spacer of the ngRNA can comprise nucleotides 4-20, 3-20, 2-20, or 1-20 of sequence number 282, 283, 284, 285, 286, 287, 288, 289, 290, 291, 292, 293, 294. In some embodiments, the spacer of the ngRNA is a ngRNA spacer listed in Table 22. The ngRNA spacers in Table 22 are annotated with their PAM sequences, enabling selection of an appropriate Cas9 protein. It can be advantageous to select a ngRNA spacer that has a PAM sequence compatible with the Cas9 protein used in the Prime Editor, thus avoiding the need to use two different Cas9 proteins. The ngRNA is capable of directing a complexed Cas9 protein to bind the edit strand of the USH2a gene; thus, a complexed Cas9 nickase containing a nuclease inactivating mutation in the HNH domain will nick the non-edit strand. A PE3 ngRNA spacer has perfect complementarity to the edit strand both pre- and post-edit.

[0343] Table 23 provides Prime Editing guide RNAs (PEgRNAs) that can be used with any Prime Editor containing a Cas9 protein capable of recognizing a TTCAAT PAM sequence. The PEgRNAs of Table 23 can also be used in Prime Editing systems further comprising a nick guide RNA (ngRNA). Such PEgRNAs and Prime Editing systems can be used, for example, to correct a c.2276 G->T mutation in USH2a. Some PEgRNAs in Table 23 can also be used to correct a c.2299delG mutation in USH2a.

[0344] The PEgRNAs exemplified in Table 23 comprise: (a) a spacer comprising at its 3′ end a sequence corresponding to sequence number 296; (b) a gRNA core capable of complexing with a Cas9 protein, and (c) an extension arm comprising: (i) an editing template at least 9 nucleotides in length and comprising at its 3′ end a sequence corresponding to any one of sequence numbers 316 or 321, and (ii) a prime binding site (PBS) comprising at its 5′ end a sequence corresponding to sequence number 301. The PEgRNA spacer can be, for example, 17-22 nucleotides in length and can comprise the sequence corresponding to any one of sequence numbers 296, 297, 298, 282, 299, or 300. In some embodiments, the PEgRNA spacer comprises sequence number 282. The PEgRNA spacers in Table 23 are annotated with their PAM sequence(s), enabling the selection of an appropriate Cas9 protein. The editing template can be referred to as a reverse transcription template (RTT). The editing template can encode wildtype USH2a gene sequence. For example, the editing template can comprise at its 3′ end the sequence corresponding to sequence number 316, 317, 318, 319, 320, 322, 324, 326, 328, 330, 332, 334, 336, 338, 340, 342, 344, 346, 348, 350, 352, 354, 356, 358, 360, 362, 364, 366, 368, 370, 372, or 374. Alternatively, the editing template can encode one or more synonymous mutations relative to the wildtype USH2A gene. The editing template can encode one or more synonymous mutations that are PAM silencing mutations and can comprise at its 3′ end the sequence corresponding to sequence number 321, 323, 325, 327, 329, 331, 333, 335, 337, 339, 341, 343, 345, 347, 349, 351, 353, 355, 357, 359, 361, 363, 365, 367, 369, 371, 373, or 375. The PBS can be, for example, 5 to 19 nucleotides in length and can comprise the sequence corresponding to any one of sequence numbers 301, 302, 303, 304, 305, 306, 307, 308, 309, 310, 311, 312, 313, 314, or 315. The PEgRNA can comprise, from 5′ to 3′, the spacer, the gRNA core, the edit template, and the PBS. The 3′ end of the edit template can be contiguous with the 5′ end of the PBS. The PEgRNA can comprise multiple RNA molecules or can be a single RNA molecule.

[0345] Any of the PEgRNAs of Table 23 can be used in a Prime Editing system further comprising a nick guide RNA (ngRNA). Such ngRNA can comprise a spacer comprising at its 3′ end a sequence corresponding to nucleotides 4-20 of any ngRNA spacer listed in Table 23 and a gRNA core capable of complexing with a Cas9 protein. For example, the sequence in the spacer of the ngRNA can comprise nucleotides 4-20, 3-20, 2-20, or 1-20 of sequence number 376, 144, 377, 378, 379, 380, or 381. In some embodiments, the spacer of the ngRNA is a ngRNA spacer listed in Table 23. The ngRNA spacers in Table 23 are annotated with their PAM sequences, enabling selection of an appropriate Cas9 protein. It can be advantageous to select a ngRNA spacer that has a PAM sequence compatible with the Cas9 protein used in the Prime Editor, thus avoiding the need to use two different Cas9 proteins. The ngRNA is capable of directing a complexed Cas9 protein to bind the edit strand of the USH2a gene; thus, a complexed Cas9 nickase containing a nuclease inactivating mutation in the HNH domain will nick the non-edit strand. A PE3 ngRNA spacer has perfect complementarity to the edit strand both pre- and post-edit.

[0346] Table 24 provides Prime Editing guide RNAs (PEgRNAs) that can be used with any Prime Editor containing a Cas9 protein capable of recognizing an AG or AGA PAM sequence. The PEgRNAs of Table 24 can also be used in Prime Editing systems further comprising a nick guide RNA (ngRNA). Such PEgRNAs and Prime Editing systems can be used, for example, to correct a c.2276 G->T mutation in USH2a.

[0347] The PEgRNAs exemplified in Table 24 comprise: (a) a spacer comprising at its 3′ end a sequence corresponding to sequence number 382; (b) a gRNA core capable of complexing with a Cas9 protein, and (c) an extension arm comprising: (i) an editing template at least 7 nucleotides in length and comprising at its 3′ end a sequence corresponding to any one of sequence numbers 403 or 406, and (ii) a prime binding site (PBS) comprising at its 5′ end a sequence corresponding to sequence number 388. The PEgRNA spacer can be, for example, 17-22 nucleotides in length and can comprise the sequence corresponding to any one of sequence numbers 382, 383, 384, 385, 386, or 387. In some embodiments, the PEgRNA spacer comprises sequence number 385. The PEgRNA spacers in Table 24 are annotated with their PAM sequence(s), enabling the selection of an appropriate Cas9 protein. The editing template can be referred to as a reverse transcription template (RTT). The editing template can encode wildtype USH2a gene sequence. For example, the editing template can comprise at its 3′ end the sequence corresponding to sequence number 403, 404, 405, 407, 409, 411, 413, 415, 417, 419, 421, 423, 425, 427, 429, 431, 433, 435, 437, 439, 441, 443, 445, 447, 449, 451, 453, 455, 457, 459, 461, 463, 465, or 467. Alternatively, the editing template can encode one or more synonymous mutations relative to the wildtype USH2A gene. The editing template can encode one or more synonymous mutations that are PAM silencing mutations and can comprise at its 3′ end the sequence corresponding to sequence number 406, 408, 410, 412, 414, 416, 418, 420, 422, 424, 426, 428, 430, 432, 434, 436, 438, 440, 442, 444, 446, 448, 450, 452, 454, 456, 458, 460, 462, 464, 466, or 468. The PBS can be, for example, 5 to 19 nucleotides in length and can comprise the sequence corresponding to any one of sequence numbers 388, 389, 390, 391, 392, 393, 394, 395, 396, 397, 398, 399, 400, 401, or 402. The PEgRNA can comprise, from 5′ to 3′, the spacer, the gRNA core, the edit template, and the PBS. The 3′ end of the edit template can be contiguous with the 5′ end of the PBS. The PEgRNA can comprise multiple RNA molecules or can be a single RNA molecule.

[0348] Any of the PEgRNAs of Table 24 can be used in a Prime Editing system further comprising a nick guide RNA (ngRNA). Such ngRNA can comprise a spacer comprising at its 3′ end a sequence corresponding to nucleotides 4-20 of any ngRNA spacer listed in Table 24 and a gRNA core capable of complexing with a Cas9 protein. For example, the sequence in the spacer of the ngRNA can comprise nucleotides 4-20, 3-20, 2-20, or 1-20 of sequence number 31, 34, 138, 35, 139, 37, 38, 39, 41, 43, 44, 140, 48, 49, 51, 52, 53, or 54. In some embodiments, the spacer of the ngRNA is a ngRNA spacer listed in Table 24. The ngRNA spacers in Table 24 are annotated with their PAM sequences, enabling selection of an appropriate Cas9 protein. It can be advantageous to select a ngRNA spacer that has a PAM sequence compatible with the Cas9 protein used in the Prime Editor, thus avoiding the need to use two different Cas9 proteins. The ngRNA is capable of directing a complexed Cas9 protein to bind the edit strand of the USH2a gene; thus, a complexed Cas9 nickase containing a nuclease inactivating mutation in the HNH domain will nick the non-edit strand. A PE3 ngRNA spacer has perfect complementarity to the edit strand both pre- and post-edit.

[0349] Table 25 provides Prime Editing guide RNAs (PEgRNAs) that can be used with any Prime Editor containing a Cas9 protein capable of recognizing an ACAAAT PAM sequence. The PEgRNAs of Table 25 can also be used in Prime Editing systems further comprising a nick guide RNA (ngRNA). Such PEgRNAs and Prime Editing systems can be used, for example, to correct a c.2276 G->T mutation in USH2a. Some PEgRNAs in Table 25 can also be used to correct a c.2299delG mutation in USH2a.

[0350] The PEgRNAs exemplified in Table 25 comprise: (a) a spacer comprising at its 3′ end a sequence corresponding to sequence number 469; (b) a gRNA core capable of complexing with a Cas9 protein, and (c) an extension arm comprising: (i) an editing template at least 17 nucleotides in length and comprising at its 3′ end a sequence corresponding to sequence number 489, and (ii) a prime binding site (PBS) comprising at its 5′ end a sequence corresponding to sequence number 474. The PEgRNA spacer can be, for example, 17-22 nucleotides in length and can comprise the sequence corresponding to any one of sequence numbers 469, 470, 471, 288, 472, or 473. In some embodiments, the PEgRNA spacer comprises sequence number 288. The PEgRNA spacers in Table 25 are annotated with their PAM sequence(s), enabling the selection of an appropriate Cas9 protein. The editing template can be referred to as a reverse transcription template (RTT). The editing template can encode wildtype USH2a gene sequence. For example, the editing template can comprise at its 3′ end the sequence corresponding to sequence number 489, 490, 491, 492, 493, 494, 495, 496, 497, 498, 499, 500, 501, 502, 503, 504, 505, 506, 507, 508, 509, 510, 511, or 512. The PBS can be, for example, 5 to 19 nucleotides in length and can comprise the sequence corresponding to any one of sequence numbers 474, 475, 476, 477, 478, 479, 480, 481, 482, 483, 484, 485, 486, 487, or 488. The PEgRNA can comprise, from 5′ to 3′, the spacer, the gRNA core, the edit template, and the PBS. The 3′ end of the edit template can be contiguous with the 5′ end of the PBS. The PEgRNA can comprise multiple RNA molecules or can be a single RNA molecule.

[0351] Any of the PEgRNAs of Table 25 can be used in a Prime Editing system further comprising a nick guide RNA (ngRNA). Such ngRNA can comprise a spacer comprising at its 3′ end a sequence corresponding to nucleotides 4-20 of any ngRNA spacer listed in Table 25 and a gRNA core capable of complexing with a Cas9 protein. For example, the sequence in the spacer of the ngRNA can comprise nucleotides 4-20, 3-20, 2-20, or 1-20 of sequence number 376, 144, 378, 379, 380, or 381. In some embodiments, the spacer of the ngRNA is a ngRNA spacer listed in Table 25. The ngRNA spacers in Table 25 are annotated with their PAM sequences, enabling selection of an appropriate Cas9 protein. It can be advantageous to select a ngRNA spacer that has a PAM sequence compatible with the Cas9 protein used in the Prime Editor, thus avoiding the need to use two different Cas9 proteins. The ngRNA is capable of directing a complexed Cas9 protein to bind the edit strand of the USH2a gene; thus, a complexed Cas9 nickase containing a nuclease inactivating mutation in the HNH domain will nick the non-edit strand. A PE3 ngRNA spacer has perfect complementarity to the edit strand both pre- and post-edit.

[0352] Table 26 provides Prime Editing guide RNAs (PEgRNAs) that can be used with any Prime Editor containing a Cas9 protein capable of recognizing a CTCAGT PAM sequence. The PEgRNAs of Table 26 can also be used in Prime Editing systems further comprising a nick guide RNA (ngRNA). Such PEgRNAs and Prime Editing systems can be used, for example, to correct a c.2276 G->T mutation in USH2a.

[0353] The PEgRNAs exemplified in Table 26 comprise: (a) a spacer comprising at its 3′ end a sequence corresponding to sequence number 513; (b) a gRNA core capable of complexing with a Cas9 protein, and (c) an extension arm comprising: (i) an editing template at least 25 nucleotides in length and comprising at its 3′ end a sequence corresponding to any one of sequence numbers 533, 534, 535, 536, or 537, and (ii) a prime binding site (PBS) comprising at its 5′ end a sequence corresponding to sequence number 518. The PEgRNA spacer can be, for example, 17-22 nucleotides in length and can comprise the sequence corresponding to any one of sequence numbers 513, 514, 515, 293, 516, or 517. In some embodiments, the PEgRNA spacer comprises sequence number 293. The PEgRNA spacers in Table 26 are annotated with their PAM sequence(s), enabling the selection of an appropriate Cas9 protein. The editing template can be referred to as a reverse transcription template (RTT). The editing template can encode wildtype USH2a gene sequence. For example, the editing template can comprise at its 3′ end the sequence corresponding to sequence number 537, 542, 547, 552, 557, 562, 567, 572, 577, 582, 587, 592, 597, 602, 607, or 612. Alternatively, the editing template can encode one or more synonymous mutations relative to the wildtype USH2A gene. The editing template can encode one or more synonymous mutations that are PAM silencing mutations and can comprise at its 3′ end the sequence corresponding to sequence number 533, 534, 535, 536, 538, 539, 540, 541, 543, 544, 545, 546, 548, 549, 550, 551, 553, 554, 555, 556, 558, 559, 560, 561, 563, 564, 565, 566, 568, 569, 570, 571, 573, 574, 575, 576, 578, 579, 580, 581, 583, 584, 585, 586, 588, 589, 590, 591, 593, 594, 595, 596, 598, 599, 600, 601, 603, 604, 605, 606, 608, 609, 610, or 611. The PBS can be, for example, 5 to 19 nucleotides in length and can comprise the sequence corresponding to any one of sequence numbers 518, 519, 520, 521, 522, 523, 524, 525, 526, 527, 528, 529, 530, 531, or 532. The PEgRNA can comprise, from 5′ to 3′, the spacer, the gRNA core, the edit template, and the PBS. The 3′ end of the edit template can be contiguous with the 5′ end of the PBS. The PEgRNA can comprise multiple RNA molecules or can be a single RNA molecule.

[0354] Any of the PEgRNAs of Table 26 can be used in a Prime Editing system further comprising a nick guide RNA (ngRNA). Such ngRNA can comprise a spacer comprising at its 3′ end a sequence corresponding to nucleotides 4-20 of any ngRNA spacer listed in Table 26 and a gRNA core capable of complexing with a Cas9 protein. For example, the sequence in the spacer of the ngRNA can comprise nucleotides 4-20, 3-20, 2-20, or 1-20 of sequence number 376, 144, 613, 614, 615, 616, 617, 379, 380, or 381. In some embodiments, the spacer of the ngRNA is a ngRNA spacer listed in Table 26. The ngRNA spacers in Table 26 are annotated with their PAM sequences, enabling selection of an appropriate Cas9 protein. It can be advantageous to select a ngRNA spacer that has a PAM sequence compatible with the Cas9 protein used in the Prime Editor, thus avoiding the need to use two different Cas9 proteins. The ngRNA is capable of directing a complexed Cas9 protein to bind the edit strand of the USH2a gene; thus, a complexed Cas9 nickase containing a nuclease inactivating mutation in the HNH domain will nick the non-edit strand. A PE3 ngRNA spacer has perfect complementarity to the edit strand both pre- and post-edit.

[0355] Table 27 provides Prime Editing guide RNAs (PEgRNAs) that can be used with any Prime Editor containing a Cas9 protein capable of recognizing a CAG PAM sequence. The PEgRNAs of Table 27 can also be used in Prime Editing systems further comprising a nick guide RNA (ngRNA). Such PEgRNAs and Prime Editing systems can be used, for example, to correct a c.2276 G->T mutation in USH2a.

[0356] The PEgRNAs exemplified in Table 27 comprise: (a) a spacer comprising at its 3′ end a sequence corresponding to sequence number 734; (b) a gRNA core capable of complexing with a Cas9 protein, and (c) an extension arm comprising: (i) an editing template at least 39 nucleotides in length and comprising at its 3′ end a sequence corresponding to any one of sequence numbers 739 or 740, and (ii) a prime binding site (PBS) comprising at its 5′ end a sequence corresponding to sequence number 719. The PEgRNA spacer can be, for example, 17-22 nucleotides in length and can comprise the sequence corresponding to any one of sequence numbers 734, 735, 736, 284, 737, or 738. In some embodiments, the PEgRNA spacer comprises sequence number 284. The PEgRNA spacers in Table 27 are annotated with their PAM sequence(s), enabling the selection of an appropriate Cas9 protein. The editing template can be referred to as a reverse transcription template (RTT). The editing template can encode wildtype USH2a gene sequence. For example, the editing template can comprise at its 3′ end the sequence corresponding to sequence number 739 or 741. Alternatively, the editing template can encode one or more synonymous mutations relative to the wildtype USH2A gene. The editing template can encode one or more synonymous mutations that are PAM silencing mutations and can comprise at its 3′ end the sequence corresponding to sequence number 740 or 741. The PBS can be, for example, 5 to 19 nucleotides in length and can comprise the sequence corresponding to any one of sequence numbers 719, 720, 721, 722, 723, 724, 725, 726, 727, 728, 729, 730, 731, 732, or 733. The PEgRNA can comprise, from 5′ to 3′, the spacer, the gRNA core, the edit template, and the PBS. The 3′ end of the edit template can be contiguous with the 5′ end of the PBS. The PEgRNA can comprise multiple RNA molecules or can be a single RNA molecule.

[0357] Any of the PEgRNAs of Table 27 can be used in a Prime Editing system further comprising a nick guide RNA (ngRNA). Such ngRNA can comprise a spacer comprising at its 3′ end a sequence corresponding to nucleotides 4-20 of any ngRNA spacer listed in Table 27 and a gRNA core capable of complexing with a Cas9 protein. For example, the sequence in the spacer of the ngRNA can comprise nucleotides 4-20, 3-20, 2-20, or 1-20 of sequence number 743, 144, 744, 745, 746, 379, 668, 747, or 381. In some embodiments, the spacer of the ngRNA is a ngRNA spacer listed in Table 27. The ngRNA spacers in Table 27 are annotated with their PAM sequences, enabling selection of an appropriate Cas9 protein. It can be advantageous to select a ngRNA spacer that has a PAM sequence compatible with the Cas9 protein used in the Prime Editor, thus avoiding the need to use two different Cas9 proteins. The ngRNA is capable of directing a complexed Cas9 protein to bind the edit strand of the USH2a gene; thus, a complexed Cas9 nickase containing a nuclease inactivating mutation in the HNH domain will nick the non-edit strand. A PE3 ngRNA spacer has perfect complementarity to the edit strand both pre- and post-edit.

[0358] Table 28 provides Prime Editing guide RNAs (PEgRNAs) that can be used with any Prime Editor containing a Cas9 protein capable of recognizing a CAG PAM sequence. The PEgRNAs of Table 28 can also be used in Prime Editing systems further comprising a nick guide RNA (ngRNA). Such PEgRNAs and Prime Editing systems can be used, for example, to correct a c.2276 G->T mutation in USH2a.

[0359] The PEgRNAs exemplified in Table 28 comprise: (a) a spacer comprising at its 3′ end a sequence corresponding to sequence number 763; (b) a gRNA core capable of complexing with a Cas9 protein, and (c) an extension arm comprising: (i) an editing template at least 20 nucleotides in length and comprising at its 3′ end a sequence corresponding to any one of sequence numbers 768, 769, 774, 775, 776, or 778, and (ii) a prime binding site (PBS) comprising at its 5′ end a sequence corresponding to sequence number 748. The PEgRNA spacer can be, for example, 17-22 nucleotides in length and can comprise the sequence corresponding to any one of sequence numbers 763, 764, 765, 285, 766, or 767. In some embodiments, the PEgRNA spacer comprises sequence number 285. The PEgRNA spacers in Table 28 are annotated with their PAM sequence(s), enabling the selection of an appropriate Cas9 protein. The editing template can be referred to as a reverse transcription template (RTT). The editing template can encode wildtype USH2a gene sequence. For example, the editing template can comprise at its 3′ end the sequence corresponding to sequence number 769, 771, 773, 779, 785, 791, 797, 803, 809, 815, 821, 827, 833, 839, 845, 851, 857, 863, 869, 875, or 881. Alternatively, the editing template can encode one or more synonymous mutations relative to the wildtype USH2a gene. The editing template can encode one or more synonymous mutations that are PAM silencing mutations and can comprise at its 3′ end the sequence corresponding to sequence number 768, 770, 772, 774, 775, 776, 777, 778, 780, 781, 782, 783, 784, 786, 787, 788, 789, 790, 792, 793, 794, 795, 796, 798, 799, 800, 801, 802, 804, 805, 806, 807, 808, 810, 811, 812, 813, 814, 816, 817, 818, 819, 820, 822, 823, 824, 825, 826, 828, 829, 830, 831, 832, 834, 835, 836, 837, 838, 840, 841, 842, 843, 844, 846, 847, 848, 849, 850, 852, 853, 854, 855, 856, 858, 859, 860, 861, 862, 864, 865, 866, 867, 868, 870, 871, 872, 873, 874, 876, 877, 878, 879, or 880. The PBS can be, for example, 5 to 19 nucleotides in length and can comprise the sequence corresponding to any one of sequence numbers 748, 749, 750, 751, 752, 753, 754, 755, 756, 757, 758, 759, 760, 761, or 762. The PEgRNA can comprise, from 5′ to 3′, the spacer, the gRNA core, the edit template, and the PBS. The 3′ end of the edit template can be contiguous with the 5′ end of the PBS. The PEgRNA can comprise multiple RNA molecules or can be a single RNA molecule.

[0360] Any of the PEgRNAs of Table 28 can be used in a Prime Editing system further comprising a nick guide RNA (ngRNA). Such ngRNA can comprise a spacer comprising at its 3′ end a sequence corresponding to nucleotides 4-20 of any ngRNA spacer listed in Table 28 and a gRNA core capable of complexing with a Cas9 protein. For example, the sequence in the spacer of the ngRNA can comprise nucleotides 4-20, 3-20, 2-20, or 1-20 of sequence number 667, 144, 882, 883, 884, 746, 379, 668, 669, 747, 381. In some embodiments, the spacer of the ngRNA is a ngRNA spacer listed in Table 28. The ngRNA spacers in Table 28 are annotated with their PAM sequences, enabling selection of an appropriate Cas9 protein. It can be advantageous to select a ngRNA spacer that has a PAM sequence compatible with the Cas9 protein used in the Prime Editor, thus avoiding the need to use two different Cas9 proteins. The ngRNA is capable of directing a complexed Cas9 protein to bind the edit strand of the USH2a gene; thus, a complexed Cas9 nickase containing a nuclease inactivating mutation in the HNH domain will nick the non-edit strand. A PE3 ngRNA spacer has perfect complementarity to the edit strand both pre- and post-edit; a PE3b ngRNA spacer has perfect complementarity to the edit strand post-edit. A PE3 or PE3b ngRNA spacer in Table 28 annotated with the same * and number code as an RTT in Table 28 has perfect complementarity to the edit strand post-edit by a PEgRNA containing the RTT.

[0361] Table 29 provides Prime Editing guide RNAs (PEgRNAs) that can be used with any Prime Editor containing a Cas9 protein capable of recognizing a TG PAM sequence. The PEgRNAs of Table 29 can also be used in Prime Editing systems further comprising a nick guide RNA (ngRNA). Such PEgRNAs and Prime Editing systems can be used, for example, to correct a c.2276 G->T mutation in USH2a.

[0362] The PEgRNAs exemplified in Table 29 comprise: (a) a spacer comprising at its 3′ end a sequence corresponding to sequence number 643; (b) a gRNA core capable of complexing with a Cas9 protein, and (c) an extension arm comprising: (i) an editing template at least 23 nucleotides in length and comprising at its 3′ end a sequence corresponding to sequence number 899, and (ii) a prime binding site (PBS) comprising at its 5′ end a sequence corresponding to sequence number 885. The PEgRNA spacer can be, for example, 17-22 nucleotides in length and can comprise the sequence corresponding to any one of sequence numbers 643, 644, 645, 646, 647, or 648. In some embodiments, the PEgRNA spacer comprises sequence number 646. The PEgRNA spacers in Table 29 are annotated with their PAM sequence(s), enabling the selection of an appropriate Cas9 protein. The editing template can be referred to as a reverse transcription template (RTT). The editing template can encode wildtype USH2a gene sequence. For example, the editing template can comprise at its 3′ end the sequence corresponding to sequence number 899, 900, 901, 902, 903, 904, 905, 906, 907, 908, 909, 910, 911, 912, 913, 914, 915, or 916. The PBS can be, for example, 5 to 19 nucleotides in length and can comprise the sequence corresponding to any one of sequence numbers 885, 886, 887, 888, 889, 890, 670, 891, 892, 893, 894, 895, 896, 897, or 898. The PEgRNA can comprise, from 5′ to 3′, the spacer, the gRNA core, the edit template, and the PBS. The 3′ end of the edit template can be contiguous with the 5′ end of the PBS. The PEgRNA can comprise multiple RNA molecules or can be a single RNA molecule.

[0363] Any of the PEgRNAs of Table 29 can be used in a Prime Editing system further comprising a nick guide RNA (ngRNA). Such ngRNA can comprise a spacer comprising at its 3′ end a sequence corresponding to nucleotides 4-20 of any ngRNA spacer listed in Table 29 and a gRNA core capable of complexing with a Cas9 protein. For example, the sequence in the spacer of the ngRNA can comprise nucleotides 4-20, 3-20, 2-20, or 1-20 of sequence number 30, 31, 32, 33, 34, 35, 36, 139, 37, 38, 39, 41, 42, 43, 44, 45, 48, 49, 50, 51, 52, 53, or 54. In some embodiments, the spacer of the ngRNA is a ngRNA spacer listed in Table 29. The ngRNA spacers in Table 29 are annotated with their PAM sequences, enabling selection of an appropriate Cas9 protein. It can be advantageous to select a ngRNA spacer that has a PAM sequence compatible with the Cas9 protein used in the Prime Editor, thus avoiding the need to use two different Cas9 proteins. The ngRNA is capable of directing a complexed Cas9 protein to bind the edit strand of the USH2a gene; thus, a complexed Cas9 nickase containing a nuclease inactivating mutation in the HNH domain will nick the non-edit strand. A PE3 ngRNA spacer has perfect complementarity to the edit strand both pre- and post-edit.

[0364] Table 30 provides Prime Editing guide RNAs (PEgRNAs) that can be used with any Prime Editor containing a Cas9 protein capable of recognizing a GAG, GAGG, or GAGGAT PAM sequence. The PEgRNAs of Table 30 can also be used in Prime Editing systems further comprising a nick guide RNA (ngRNA). Such PEgRNAs and Prime Editing systems can be used, for example, to correct a c.2276 G->T mutation in USH2a.

[0365] The PEgRNAs exemplified in Table 30 comprise: (a) a spacer comprising at its 3′ end a sequence corresponding to sequence number 932; (b) a gRNA core capable of complexing with a Cas9 protein, and (c) an extension arm comprising: (i) an editing template at least 13 nucleotides in length and comprising at its 3′ end a sequence corresponding to any one of sequence numbers 937, 938, 943, or 945, and (ii) a prime binding site (PBS) comprising at its 5′ end a sequence corresponding to sequence number 917. The PEgRNA spacer can be, for example, 17-22 nucleotides in length and can comprise the sequence corresponding to any one of sequence numbers 932, 933, 934, 379, 935, or 936. In some embodiments, the PEgRNA spacer comprises sequence number 379. The PEgRNA spacers in Table 30 are annotated with their PAM sequence(s), enabling the selection of an appropriate Cas9 protein. The editing template can be referred to as a reverse transcription template (RTT). The editing template can encode wildtype USH2a gene sequence. For example, the editing template can comprise at its 3′ end the sequence corresponding to sequence number 938, 940, 942, 946, 950, 954, 958, 962, 966, 970, 974, 978, 982, 986, 990, 994, 998, 1002, 1006, 1010, 1014, 1018, 1022, 1026, 1030, 1034, 1038, or 1042. Alternatively, the editing template can encode one or more synonymous mutations relative to the wildtype USH2a gene. The editing template can encode one or more synonymous mutations that are PAM silencing mutations and can comprise at its 3′ end the sequence corresponding to sequence number 937, 939, 941, 943, 944, 945, 947, 948, 949, 951, 952, 953, 955, 956, 957, 959, 960, 961, 963, 964, 965, 967, 968, 969, 971, 972, 973, 975, 976, 977, 979, 980, 981, 983, 984, 985, 987, 988, 989, 991, 992, 993, 995, 996, 997, 999, 1000, 1001, 1003, 1004, 1005, 1007, 1008, 1009, 1011, 1012, 1013, 1015, 1016, 1017, 1019, 1020, 1021, 1023, 1024, 1025, 1027, 1028, 1029, 1031, 1032, 1033, 1035, 1036, 1037, 1039, 1040, or 1041. The PBS can be, for example, 5 to 19 nucleotides in length and can comprise the sequence corresponding to any one of sequence numbers 917, 918, 919, 920, 921, 922, 923, 924, 925, 926, 927, 928, 929, 930, or 931. The PEgRNA can comprise, from 5′ to 3′, the spacer, the gRNA core, the edit template, and the PBS. The 3′ end of the edit template can be contiguous with the 5′ end of the PBS. The PEgRNA can comprise multiple RNA molecules or can be a single RNA molecule.

[0366] Any of the PEgRNAs of Table 30 can be used in a Prime Editing system further comprising a nick guide RNA (ngRNA). Such ngRNA can comprise a spacer comprising at its 3′ end a sequence corresponding to nucleotides 4-20 of any ngRNA spacer listed in Table 30 and a gRNA core capable of complexing with a Cas9 protein. For example, the sequence in the spacer of the ngRNA can comprise nucleotides 4-20, 3-20, 2-20, or 1-20 of sequence number 30, 282, 284, 36, 962, 285, 286, 1043, 287, 288, 289, 290, 291, 292, 293, 294, or 295. In some embodiments, the spacer of the ngRNA is a ngRNA spacer listed in Table 30. The ngRNA spacers in Table 30 are annotated with their PAM sequences, enabling selection of an appropriate Cas9 protein. It can be advantageous to select a ngRNA spacer that has a PAM sequence compatible with the Cas9 protein used in the Prime Editor, thus avoiding the need to use two different Cas9 proteins. The ngRNA is capable of directing a complexed Cas9 protein to bind the edit strand of the USH2a gene; thus, a complexed Cas9 nickase containing a nuclease inactivating mutation in the HNH domain will nick the non-edit strand. A PE3 ngRNA spacer has perfect complementarity to the edit strand both pre- and post-edit; a PE3b ngRNA spacer has perfect complementarity to the edit strand post-edit. A PE3 or PE3b ngRNA spacer in Table 30 annotated with the same * and number code as an RTT in Table 30 has perfect complementarity to the edit strand post-edit by a PEgRNA containing the RTT.

[0367] Table 31 provides Prime Editing guide RNAs (PEgRNAs) that can be used with any Prime Editor containing a Cas9 protein capable of recognizing an ATGG PAM sequence. The PEgRNAs of Table 31 can also be used in Prime Editing systems further comprising a nick guide RNA (ngRNA). Such PEgRNAs and Prime Editing systems can be used, for example, to correct a c.2276 G->T mutation in USH2a.

[0368] The PEgRNAs exemplified in Table 31 comprise: (a) a spacer comprising at its 3′ end a sequence corresponding to sequence number 1059; (b) a gRNA core capable of complexing with a Cas9 protein, and (c) an extension arm comprising: (i) an editing template at least 26 nucleotides in length and comprising at its 3′ end a sequence corresponding to sequence number 1064, and (ii) a prime binding site (PBS) comprising at its 5′ end a sequence corresponding to sequence number 1044. The PEgRNA spacer can be, for example, 17-22 nucleotides in length and can comprise the sequence corresponding to any one of sequence numbers 1059, 1060, 1061, 1043, 1062, or 1063. In some embodiments, the PEgRNA spacer comprises sequence number 1043. The PEgRNA spacers in Table 31 are annotated with their PAM sequence(s), enabling the selection of an appropriate Cas9 protein. The editing template can be referred to as a reverse transcription template (RTT). The editing template can encode wildtype USH2a gene sequence. For example, the editing template can comprise at its 3′ end the sequence corresponding to sequence number 1064, 1065, 1066, 1067, 1068, 1069, 1070, 1071, 1072, 1073, 1074, 1075, 1076, 1077, or 1078. The PBS can be, for example, 5 to 19 nucleotides in length and can comprise the sequence corresponding to any one of sequence numbers 1044, 1045, 1046, 1047, 1048, 1049, 1050, 1051, 1052, 1053, 1054, 1055, 1056, 1057, or 1058. The PEgRNA can comprise, from 5′ to 3′, the spacer, the gRNA core, the edit template, and the PBS. The 3′ end of the edit template can be contiguous with the 5′ end of the PBS. The PEgRNA can comprise multiple RNA molecules or can be a single RNA molecule.

[0369] Any of the PEgRNAs of Table 31 can be used in a Prime Editing system further comprising a nick guide RNA (ngRNA). Such ngRNA can comprise a spacer comprising at its 3′ end a sequence corresponding to nucleotides 4-20 of any ngRNA spacer listed in Table 31 and a gRNA core capable of complexing with a Cas9 protein. For example, the sequence in the spacer of the ngRNA can comprise nucleotides 4-20, 3-20, 2-20, or 1-20 of sequence number 743, 667, 1079, 1080, or 379. In some embodiments, the spacer of the ngRNA is a ngRNA spacer listed in Table 31. The ngRNA spacers in Table 31 are annotated with their PAM sequences, enabling selection of an appropriate Cas9 protein. It can be advantageous to select a ngRNA spacer that has a PAM sequence compatible with the Cas9 protein used in the Prime Editor, thus avoiding the need to use two different Cas9 proteins. The ngRNA is capable of directing a complexed Cas9 protein to bind the edit strand of the USH2a gene; thus, a complexed Cas9 nickase containing a nuclease inactivating mutation in the HNH domain will nick the non-edit strand. A PE3 ngRNA spacer has perfect complementarity to the edit strand both pre- and post-edit; a PE3b ngRNA spacer has perfect complementarity to the edit strand post-edit.

[0370] Table 32 provides Prime Editing guide RNAs (PEgRNAs) that can be used with any Prime Editor containing a Cas9 protein capable of recognizing an AG PAM sequence. The PEgRNAs of Table 32 can also be used in Prime Editing systems further comprising a nick guide RNA (ngRNA). Such PEgRNAs and Prime Editing systems can be used, for example, to correct a c.2276 G->T mutation in USH2a.

[0371] The PEgRNAs exemplified in Table 32 comprise: (a) a spacer comprising at its 3′ end a sequence corresponding to sequence number 1095; (b) a gRNA core capable of complexing with a Cas9 protein, and (c) an extension arm comprising: (i) an editing template at least 16 nucleotides in length and comprising at its 3′ end a sequence corresponding to any one of sequence numbers 1101 or 1105, and (ii) a prime binding site (PBS) comprising at its 5′ end a sequence corresponding to sequence number 1081. The PEgRNA spacer can be, for example, 17-22 nucleotides in length and can comprise the sequence corresponding to any one of sequence numbers 1095, 1096, 1097, 1098, 1099, or 1100. In some embodiments, the PEgRNA spacer comprises sequence number 1098. The PEgRNA spacers in Table 32 are annotated with their PAM sequence(s), enabling the selection of an appropriate Cas9 protein. The editing template can be referred to as a reverse transcription template (RTT). The editing template can encode wildtype USH2a gene sequence. For example, the editing template can comprise at its 3′ end the sequence corresponding to sequence number 1101, 1102, 1103, 1104, 36, 1107, 1109, 1111, 1113, 1115, 1117, 1119, 1121, 1123, 1125, 1127, 1129, 1131, 1133, 1135, 1137, 1139, 1141, 1143, or 1145. Alternatively, the editing template can encode one or more synonymous mutations relative to the wildtype USH2a gene. The editing template can encode one or more synonymous mutations that are PAM silencing mutations and can comprise at its 3′ end the sequence corresponding to sequence number 1105, 1106, 1108, 1110, 1112, 1114, 1116, 1118, 1120, 1122, 1124, 1126, 1128, 1130, 1132, 1134, 1136, 1138, 1140, 1142, 1144, or 1146. The PBS can be, for example, 5 to 19 nucleotides in length and can comprise the sequence corresponding to any one of sequence numbers 1081, 1082, 1083, 1084, 1085, 1086, 1087, 1088, 1089, 1090, 1091, 1092, 1093, 681, or 1094. The PEgRNA can comprise, from 5′ to 3′, the spacer, the gRNA core, the edit template, and the PBS. The 3′ end of the edit template can be contiguous with the 5′ end of the PBS. The PEgRNA can comprise multiple RNA molecules or can be a single RNA molecule.

[0372] Any of the PEgRNAs of Table 32 can be used in a Prime Editing system further comprising a nick guide RNA (ngRNA). Such ngRNA can comprise a spacer comprising at its 3′ end a sequence corresponding to nucleotides 4-20 of any ngRNA spacer listed in Table 32 and a gRNA core capable of complexing with a Cas9 protein. For example, the sequence in the spacer of the ngRNA can comprise nucleotides 4-20, 3-20, 2-20, or 1-20 of sequence number 30, 1147, 31, 33, 1148, 34, 35, 36, 1106, 139, 37, 38, 39, 41, 42, 1149, 43, 44, 140, 48, 49, 51, 52, 53, or 54. In some embodiments, the spacer of the ngRNA is a ngRNA spacer listed in Table 32. The ngRNA spacers in Table 32 are annotated with their PAM sequences, enabling selection of an appropriate Cas9 protein. It can be advantageous to select a ngRNA spacer that has a PAM sequence compatible with the Cas9 protein used in the Prime Editor, thus avoiding the need to use two different Cas9 proteins. The ngRNA is capable of directing a complexed Cas9 protein to bind the edit strand of the USH2a gene; thus, a complexed Cas9 nickase containing a nuclease inactivating mutation in the HNH domain will nick the non-edit strand. A PE3 ngRNA spacer has perfect complementarity to the edit strand both pre- and post-edit; a PE3b ngRNA spacer has perfect complementarity to the edit strand post-edit. A PE3 or PE3b ngRNA spacer in Table 32 annotated with the same * and number code as an RTT in Table 32 has perfect complementarity to the edit strand post-edit by a PEgRNA containing the RTT.

[0373] Table 33 provides Prime Editing guide RNAs (PEgRNAs) that can be used with any Prime Editor containing a Cas9 protein capable of recognizing a GAG PAM sequence. The PEgRNAs of Table 33 can also be used in Prime Editing systems further comprising a nick guide RNA (ngRNA). Such PEgRNAs and Prime Editing systems can be used, for example, to correct a c.2276 G->T mutation in USH2a.

[0374] The PEgRNAs exemplified in Table 33 comprise: (a) a spacer comprising at its 3′ end a sequence corresponding to sequence number 1164; (b) a gRNA core capable of complexing with a Cas9 protein, and (c) an extension arm comprising: (i) an editing template at least 17 nucleotides in length and comprising at its 3′ end a sequence corresponding to any one of sequence numbers 1169, 1170, 1175, 1176, 1178, or 1179, and (ii) a prime binding site (PBS) comprising at its 5′ end a sequence corresponding to sequence number 1150. The PEgRNA spacer can be, for example, 17-22 nucleotides in length and can comprise the sequence corresponding to any one of sequence numbers 1164, 1165, 1166, 747, 1167, or 1168. In some embodiments, the PEgRNA spacer comprises sequence number 747. The PEgRNA spacers in Table 33 are annotated with their PAM sequence(s), enabling the selection of an appropriate Cas9 protein. The editing template can be referred to as a reverse transcription template (RTT). The editing template can encode wildtype USH2a gene sequence. For example, the editing template can comprise at its 3′ end the sequence corresponding to sequence number 1169, 1171, 1173, 1177, 1183, 1189, 1195, 1201, 1207, 1213, 1219, 1225, 1231, 1237, 1243, 1249, 1255, 1261, 1267, 1273, 1279, 1285, 1291, or 1297. Alternatively, the editing template can encode one or more synonymous mutations relative to the wildtype USH2a gene. The editing template can encode one or more synonymous mutations that are PAM silencing mutations and can comprise at its 3′ end the sequence corresponding to sequence number 1170, 1172, 1174, 1175, 1176, 1178, 1179, 1180, 1181, 1182, 1184, 1185, 1186, 1187, 1188, 1190, 1191, 1192, 1193, 1194, 1196, 1197, 1198, 1199, 1200, 1202, 1203, 1204, 1205, 1206, 1208, 1209, 1210, 1211, 1212, 1214, 1215, 1216, 1217, 1218, 1220, 1221, 1222, 1223, 1224, 1226, 1227, 1228, 1229, 1230, 1232, 1233, 1234, 1235, 1236, 1238, 1239, 1240, 1241, 1242, 1244, 1245, 1246, 1247, 1248, 1250, 1251, 1252, 1253, 1254, 1256, 1257, 1258, 1259, 1260, 1262, 1263, 1264, 1265, 1266, 1268, 1269, 1270, 1271, 1272, 1274, 1275, 1276, 1277, 1278, 1280, 1281, 1282, 1283, 1284, 1286, 1287, 1288, 1289, 1290, 1292, 1293, 1294, 1295, 1296, 1298, 1299, or 1300. The PBS can be, for example, 5 to 19 nucleotides in length and can comprise the sequence corresponding to any one of sequence numbers 1150, 1151, 1152, 1153, 1154, 1155, 1156, 1157, 1158, 1159, 1160, 1161, 679, 1162, or 1163. The PEgRNA can comprise, from 5′ to 3′, the spacer, the gRNA core, the edit template, and the PBS. The 3′ end of the edit template can be contiguous with the 5′ end of the PBS. The PEgRNA can comprise multiple RNA molecules or can be a single RNA molecule.

[0375] Any of the PEgRNAs of Table 33 can be used in a Prime Editing system further comprising a nick guide RNA (ngRNA). Such ngRNA can comprise a spacer comprising at its 3′ end a sequence corresponding to nucleotides 4-20 of any ngRNA spacer listed in Table 33 and a gRNA core capable of complexing with a Cas9 protein. For example, the sequence in the spacer of the ngRNA can comprise nucleotides 4-20, 3-20, 2-20, or 1-20 of sequence number 284, 285, 287, 1301, 1302, 1303, 1304, 1305, 1306, or 295. In some embodiments, the spacer of the ngRNA is a ngRNA spacer listed in Table 33. The ngRNA spacers in Table 33 are annotated with their PAM sequences, enabling selection of an appropriate Cas9 protein. It can be advantageous to select a ngRNA spacer that has a PAM sequence compatible with the Cas9 protein used in the Prime Editor, thus avoiding the need to use two different Cas9 proteins. The ngRNA is capable of directing a complexed Cas9 protein to bind the edit strand of the USH2a gene; thus, a complexed Cas9 nickase containing a nuclease inactivating mutation in the HNH domain will nick the non-edit strand. A PE3 ngRNA spacer has perfect complementarity to the edit strand both pre- and post-edit; a PE3b ngRNA spacer has perfect complementarity to the edit strand post-edit. A PE3 or PE3b ngRNA spacer in Table 33 annotated with the same * and number code as an RTT in Table 33 has perfect complementarity to the edit strand post-edit by a PEgRNA containing the RTT.

[0376] Table 34 provides Prime Editing guide RNAs (PEgRNAs) that can be used with any Prime Editor containing a Cas9 protein capable of recognizing an AG or AGA PAM sequence. The PEgRNAs of Table 34 can also be used in Prime Editing systems further comprising a nick guide RNA (ngRNA). Such PEgRNAs and Prime Editing systems can be used, for example, to correct a c.2276 G->T mutation in USH2a.

[0377] The PEgRNAs exemplified in Table 34 comprise: (a) a spacer comprising at its 3′ end a sequence corresponding to sequence number 1321; (b) a gRNA core capable of complexing with a Cas9 protein, and (c) an extension arm comprising: (i) an editing template at least 18 nucleotides in length and comprising at its 3′ end a sequence corresponding to any one of sequence numbers 1327, 1329, or 1330, and (ii) a prime binding site (PBS) comprising at its 5′ end a sequence corresponding to sequence number 1307. The PEgRNA spacer can be, for example, 17-22 nucleotides in length and can comprise the sequence corresponding to any one of sequence numbers 1321, 1322, 1323, 1324, 1325, or 1326. In some embodiments, the PEgRNA spacer comprises sequence number 1324. The PEgRNA spacers in Table 34 are annotated with their PAM sequence(s), enabling the selection of an appropriate Cas9 protein. The editing template can be referred to as a reverse transcription template (RTT). The editing template can encode wildtype USH2a gene sequence. For example, the editing template can comprise at its 3′ end the sequence corresponding to sequence number 1327, 1328, 1303, 1331, 1334, 1337, 1340, 1343, 1346, 1349, 1352, 1355, 1358, 1361, 1364, 1367, 1370, 1373, 1376, 1379, 1382, 1385, or 1388. Alternatively, the editing template can encode one or more synonymous mutations relative to the wildtype USH2a gene. The editing template can encode one or more synonymous mutations that are PAM silencing mutations and can comprise at its 3′ end the sequence corresponding to sequence number 1329, 1330, 1332, 1333, 1335, 1336, 1338, 1339, 1341, 1342, 1344, 1345, 1347, 1348, 1350, 1351, 1353, 1354, 1356, 1357, 1359, 1360, 1362, 1363, 1365, 1366, 1368, 1369, 1371, 1372, 1374, 1375, 1377, 1378, 1380, 1381, 1383, 1384, 1386, or 1387. The PBS can be, for example, 5 to 19 nucleotides in length and can comprise the sequence corresponding to any one of sequence numbers 1307, 1308, 1309, 1310, 1311, 1312, 1313, 1314, 1315, 1316, 1317, 677, 1318, 1319, or 1320. The PEgRNA can comprise, from 5′ to 3′, the spacer, the gRNA core, the edit template, and the PBS. The 3′ end of the edit template can be contiguous with the 5′ end of the PBS. The PEgRNA can comprise multiple RNA molecules or can be a single RNA molecule.

[0378] Any of the PEgRNAs of Table 34 can be used in a Prime Editing system further comprising a nick guide RNA (ngRNA). Such ngRNA can comprise a spacer comprising at its 3′ end a sequence corresponding to nucleotides 4-20 of any ngRNA spacer listed in Table 34 and a gRNA core capable of complexing with a Cas9 protein. For example, the sequence in the spacer of the ngRNA can comprise nucleotides 4-20, 3-20, 2-20, or 1-20 of sequence number 1389, 30, 31, 1390, 1391, 33, 34, 35, 1392, 1393, 36, 139, 37, 38, 39, 41, 1394, 1395, 42, 43, 44, 1396, 1397, 45, 48, 49, 51, 52, 53, or 54. In some embodiments, the spacer of the ngRNA is a ngRNA spacer listed in Table 34. The ngRNA spacers in Table 34 are annotated with their PAM sequences, enabling selection of an appropriate Cas9 protein. It can be advantageous to select a ngRNA spacer that has a PAM sequence compatible with the Cas9 protein used in the Prime Editor, thus avoiding the need to use two different Cas9 proteins. The ngRNA is capable of directing a complexed Cas9 protein to bind the edit strand of the USH2a gene; thus, a complexed Cas9 nickase containing a nuclease inactivating mutation in the HNH domain will nick the non-edit strand. A PE3 ngRNA spacer has perfect complementarity to the edit strand both pre- and post-edit; a PE3b ngRNA spacer has perfect complementarity to the edit strand post-edit. A PE3 or PE3b ngRNA spacer in Table 34 annotated with the same * and number code as an RTT in Table 34 has perfect complementarity to the edit strand post-edit by a PEgRNA containing the RTT.

[0379] Table 35 provides Prime Editing guide RNAs (PEgRNAs) that can be used with any Prime Editor containing a Cas9 protein capable of recognizing a CAG or CAGAGT PAM sequence. The PEgRNAs of Table 35 can also be used in Prime Editing systems further comprising a nick guide RNA (ngRNA). Such PEgRNAs and Prime Editing systems can be used, for example, to correct a c.2276 G->T mutation in USH2a.

[0380] The PEgRNAs exemplified in Table 35 comprise: (a) a spacer comprising at its 3′ end a sequence corresponding to sequence number 1412; (b) a gRNA core capable of complexing with a Cas9 protein, and (c) an extension arm comprising: (i) an editing template at least 19 nucleotides in length and comprising at its 3′ end a sequence corresponding to any one of sequence numbers 1417, 1418, 1422, 1423, 1424, or 1425, and (ii) a prime binding site (PBS) comprising at its 5′ end a sequence corresponding to sequence number 1398. The PEgRNA spacer can be, for example, 17-22 nucleotides in length and can comprise the sequence corresponding to any one of sequence numbers 1412, 1413, 1414, 381, 1415, or 1416. In some embodiments, the PEgRNA spacer comprises sequence number 381. The PEgRNA spacers in Table 35 are annotated with their PAM sequence(s), enabling the selection of an appropriate Cas9 protein. The editing template can be referred to as a reverse transcription template (RTT). The editing template can encode wildtype USH2a gene sequence. For example, the editing template can comprise at its 3′ end the sequence corresponding to sequence number 1418, 42, 1420, 1426, 1432, 1438, 1444, 1450, 1456, 1462, 1468, 1474, 1480, 1486, 1492, 1498, 1504, 1510, 1516, 1522, 1528, or 1534. Alternatively, the editing template can encode one or more synonymous mutations relative to the wildtype USH2a gene. The editing template can encode one or more synonymous mutations that are PAM silencing mutations and can comprise at its 3′ end the sequence corresponding to sequence number 1417, 1394, 1419, 1421, 1422, 1423, 1424, 1425, 1427, 1428, 1429, 1430, 1431, 1433, 1434, 1435, 1436, 1437, 1439, 1440, 1441, 1442, 1443, 1445, 1446, 1447, 1448, 1449, 1451, 1452, 1453, 1454, 1455, 1457, 1458, 1459, 1460, 1461, 1463, 1464, 1465, 1466, 1467, 1469, 1470, 1471, 1472, 1473, 1475, 1476, 1477, 1478, 1479, 1481, 1482, 1483, 1484, 1485, 1487, 1488, 1489, 1490, 1491, 1493, 1494, 1495, 1496, 1497, 1499, 1500, 1501, 1502, 1503, 1505, 1506, 1507, 1508, 1509, 1511, 1512, 1513, 1514, 1515, 1517, 1518, 1519, 1520, 1521, 1523, 1524, 1525, 1526, 1527, 1529, 1530, 1531, 1532, or1533. The PBS can be, for example, 5 to 19 nucleotides in length and can comprise the sequence corresponding to any one of sequence numbers 1398, 1399, 1400, 1401, 1402, 1403, 1404, 1405, 1406, 1407, 675, 1408, 1409, 1410, or 1411. The PEgRNA can comprise, from 5′ to 3′, the spacer, the gRNA core, the edit template, and the PBS. The 3′ end of the edit template can be contiguous with the 5′ end of the PBS. The PEgRNA can comprise multiple RNA molecules or can be a single RNA molecule.

[0381] Any of the PEgRNAs of Table 35 can be used in a Prime Editing system further comprising a nick guide RNA (ngRNA). Such ngRNA can comprise a spacer comprising at its 3′ end a sequence corresponding to nucleotides 4-20 of any ngRNA spacer listed in Table 35 and a gRNA core capable of complexing with a Cas9 protein. For example, the sequence in the spacer of the ngRNA can comprise nucleotides 4-20, 3-20, 2-20, or 1-20 of sequence number 282, 284, 1392, 1393, 36, 1535, 1536, 1537, 285, 286, 287, 288, 290, 1301, 1302, 1538, 1539, 1540, 1303, 291, 292, 293, 294, or 295. In some embodiments, the spacer of the ngRNA is a ngRNA spacer listed in Table 35. The ngRNA spacers in Table 35 are annotated with their PAM sequences, enabling selection of an appropriate Cas9 protein. It can be advantageous to select a ngRNA spacer that has a PAM sequence compatible with the Cas9 protein used in the Prime Editor, thus avoiding the need to use two different Cas9 proteins. The ngRNA is capable of directing a complexed Cas9 protein to bind the edit strand of the USH2a gene; thus, a complexed Cas9 nickase containing a nuclease inactivating mutation in the HNH domain will nick the non-edit strand. A PE3 ngRNA spacer has perfect complementarity to the edit strand both pre- and post-edit; a PE3b ngRNA spacer has perfect complementarity to the edit strand post-edit. A PE3 or PE3b ngRNA spacer in Table 35 annotated with the same * and number code as an RTT in Table 35 has perfect complementarity to the edit strand post-edit by a PEgRNA containing the RTT.

[0382] Table 36 provides Prime Editing guide RNAs (PEgRNAs) that can be used with any Prime Editor containing a Cas9 protein capable of recognizing a GG or GGA PAM sequence. The PEgRNAs of Table 36 can also be used in Prime Editing systems further comprising a nick guide RNA (ngRNA). Such PEgRNAs and Prime Editing systems can be used, for example, to correct a c.2276 G->T mutation in USH2a.

[0383] The PEgRNAs exemplified in Table 36 comprise: (a) a spacer comprising at its 3′ end a sequence corresponding to sequence number 1895; (b) a gRNA core capable of complexing with a Cas9 protein, and (c) an extension arm comprising: (i) an editing template at least 11 nucleotides in length and comprising at its 3′ end a sequence corresponding to any one of sequence numbers 1901 or 1904, and (ii) a prime binding site (PBS) comprising at its 5′ end a sequence corresponding to sequence number 1880. The PEgRNA spacer can be, for example, 17-22 nucleotides in length and can comprise the sequence corresponding to any one of sequence numbers 1895, 1896, 1897, 1898, 1899, or 1900. In some embodiments, the PEgRNA spacer comprises sequence number 1898. The PEgRNA spacers in Table 36 are annotated with their PAM sequence(s), enabling the selection of an appropriate Cas9 protein. The editing template can be referred to as a reverse transcription template (RTT). The editing template can encode wildtype USH2a gene sequence. For example, the editing template can comprise at its 3′ end the sequence corresponding to sequence number 1901, 1902, 1903, 1905, 1907, 1909, 1911, 1913, 1915, 1917, 1919, 1921, 1923, 1925, 1927, 1929, 1931, 1933, 1935, 1937, 1939, 1941, 1943, 1945, 1947, 1949, 1951, 1953, 1955, or 1957. Alternatively, the editing template can encode one or more synonymous mutations relative to the wildtype USH2a gene. The editing template can encode one or more synonymous mutations that are PAM silencing mutations and can comprise at its 3′ end the sequence corresponding to sequence number 1904, 1906, 1908, 1910, 1912, 1914, 1916, 1918, 1920, 1922, 1924, 1926, 1928, 1930, 1932, 1934, 1936, 1938, 1940, 1942, 1944, 1946, 1948, 1950, 1952, 1954, or 1956. The PBS can be, for example, 5 to 19 nucleotides in length and can comprise the sequence corresponding to any one of sequence numbers 1880, 1881, 1882, 1883, 1884, 1885, 1886, 1887, 1888, 1889, 1890, 1891, 1892, 1893, or 1894.

[0384] The PEgRNA can comprise, from 5′ to 3′, the spacer, the gRNA core, the edit template, and the PBS. The 3′ end of the edit template can be contiguous with the 5′ end of the PBS. The PEgRNA can comprise multiple RNA molecules or can be a single RNA molecule. Exemplary PEgRNAs provided in Table 36 can comprise a sequence corresponding to any one of sequence numbers 1958 to 1989. Any PEgRNA exemplified in Table 36 may comprise, or further comprise, a 3′ motif at the 3′ end of the extension arm, for example, a hairpin-forming motif or a series of 1, 2, 3, 4, 5, 6, 7 or more U nucleotides. In some embodiments, the PEgRNA comprises 4 U nucleotides at its 3′ end. Without being bound by theory, such 3′ motifs are believed to increase PEgRNA stability. The PEgRNA may alternatively or additionally comprise one or more chemical modifications, such as phosphorothioate (PS) bond(s), 2′-O-methylated (2′-Ome) nucleotides, or a combination thereof. In some embodiments, the PEgRNA comprise 3′ mN*mN*mN*N and 5′mN*mN*mN* modifications, where m indicates that the nucleotide contains a 2′-O-Me modification and a * indicates the presence of a phosphorothioate bond. PEgRNA sequences exemplified in Table 36 may alternatively be adapted for expression from a DNA template, for example, by including a 5′ terminal G if the spacer of the PEgRNA begins with another nucleotide, by including 6 or 7 U nucleotides at the 3′ end of the extension arm, or both. Such expression-adapted sequences may further comprise a hairpin-forming motif between the PBS and the 3′ terminal U series.

[0385] Any of the PEgRNAs of Table 36 can be used in a Prime Editing system further comprising a nick guide RNA (ngRNA). Such ngRNA can comprise a spacer comprising at its 3′ end a sequence corresponding to nucleotides 4-20 of any ngRNA spacer listed in Table 36 and a gRNA core capable of complexing with a Cas9 protein. For example, the sequence in the spacer of the ngRNA can comprise nucleotides 4-20, 3-20, 2-20, or 1-20 of sequence number 30, 31, 34, 138, 35, 139, 37, 38, 39, 41, 43, 44, 140, 48, 49, 51, 52, 53, or 54. In some embodiments, the spacer of the ngRNA is a ngRNA spacer listed in Table 36. The ngRNA spacers in Table 36 are annotated with their PAM sequences, enabling selection of an appropriate Cas9 protein. It can be advantageous to select a ngRNA spacer that has a PAM sequence compatible with the Cas9 protein used in the Prime Editor, thus avoiding the need to use two different Cas9 proteins. The ngRNA is capable of directing a complexed Cas9 protein to bind the edit strand of the USH2a gene; thus, a complexed Cas9 nickase containing a nuclease inactivating mutation in the HNH domain will nick the non-edit strand. A PE3 ngRNA spacer has perfect complementarity to the edit strand both pre- and post-edit; a PE3b ngRNA spacer has perfect complementarity to the edit strand post-edit. A PE3 or PE3b ngRNA spacer in Table 36 annotated with the same * and number code as an RTT in Table 36 has perfect complementarity to the edit strand post-edit by a PEgRNA containing the RTT.

[0386] Table 37 provides Prime Editing guide RNAs (PEgRNAs) that can be used with any Prime Editor containing a Cas9 protein capable of recognizing an AG or AGG PAM sequence. The PEgRNAs of Table 37 can also be used in Prime Editing systems further comprising a nick guide RNA (ngRNA). Such PEgRNAs and Prime Editing systems can be used, for example, to correct a c.2276 G->T mutation in USH2a.

[0387] The PEgRNAs exemplified in Table 37 comprise: (a) a spacer comprising at its 3′ end a sequence corresponding to sequence number 2005; (b) a gRNA core capable of complexing with a Cas9 protein, and (c) an extension arm comprising: (i) an editing template at least 12 nucleotides in length and comprising at its 3′ end a sequence corresponding to any one of sequence numbers 2011, and (ii) a prime binding site (PBS) comprising at its 5′ end a sequence corresponding to sequence number 1990. The PEgRNA spacer can be, for example, 17-22 nucleotides in length and can comprise the sequence corresponding to any one of sequence numbers 2005, 2006, 2007, 2008, 2009, or 2010. In some embodiments, the PEgRNA spacer comprises sequence number 2008. The PEgRNA spacers in Table 37 are annotated with their PAM sequence(s), enabling the selection of an appropriate Cas9 protein. The editing template can be referred to as a reverse transcription template (RTT). The editing template can encode wildtype USH2a gene sequence. For example, the editing template can comprise at its 3′ end the sequence corresponding to sequence number 2011, 2012, 2013, 2014, 2015, 2016, 2017, 2018, 2019, 2020, 2021, 2022, 2023, 2024, 2025, 2026, 2027, 2028, 2029, 2030, 2031, 2032, 2033, 2034, 2035, 2036, 2037, 2038, or 2039. The PBS can be, for example, 5 to 19 nucleotides in length and can comprise the sequence corresponding to any one of sequence numbers 1990, 1991, 1992, 1993, 1994, 1995, 1996, 1997, 1998, 1999, 2000, 2001, 2002, 2003, or 2004.

[0388] The PEgRNA can comprise, from 5′ to 3′, the spacer, the gRNA core, the edit template, and the PBS. The 3′ end of the edit template can be contiguous with the 5′ end of the PBS. The PEgRNA can comprise multiple RNA molecules or can be a single RNA molecule. Exemplary PEgRNAs provided in Table 37 can comprise a sequence corresponding to any one of sequence numbers 2040 to 2071 or 7535 to 7542. Any PEgRNA exemplified in Table 37 may comprise, or further comprise, a 3′ motif at the 3′ end of the extension arm, for example, a hairpin-forming motif or a series of 1, 2, 3, 4, 5, 6, 7 or more U nucleotides. In some embodiments, the PEgRNA comprises 4 U nucleotides at its 3′ end. Without being bound by theory, such 3′ motifs are believed to increase PEgRNA stability. The PEgRNA may alternatively or additionally comprise one or more chemical modifications, such as phosphorothioate (PS) bond(s), 2′-O-methylated (2′-Ome) nucleotides, or a combination thereof. In some embodiments, the PEgRNA comprise 3′ mN*mN*mN*N and 5′mN*mN*mN* modifications, where m indicates that the nucleotide contains a 2′-O-Me modification and a * indicates the presence of a phosphorothioate bond. PEgRNA sequences exemplified in Table 37 may alternatively be adapted for expression from a DNA template, for example, by including a 5′ terminal G if the spacer of the PEgRNA begins with another nucleotide, by including 6 or 7 U nucleotides at the 3′ end of the extension arm, or both. Such expression-adapted sequences may further comprise a hairpin-forming motif between the PBS and the 3′ terminal U series.

[0389] Any of the PEgRNAs of Table 37 can be used in a Prime Editing system further comprising a nick guide RNA (ngRNA). Such ngRNA can comprise a spacer comprising at its 3′ end a sequence corresponding to nucleotides 4-20 of any ngRNA spacer listed in Table 37 and a gRNA core capable of complexing with a Cas9 protein. For example, the sequence in the spacer of the ngRNA can comprise nucleotides 4-20, 3-20, 2-20, or 1-20 of sequence number 2039, 30, 31, 33, 34, 138, 35, 139, 37, 38, 39, 41, 43, 44, 140, 48, 49, 51, 52, 53, or 54. In some embodiments, the spacer of the ngRNA is a ngRNA spacer listed in Table 37. The ngRNA spacers in Table 37 are annotated with their PAM sequences, enabling selection of an appropriate Cas9 protein. It can be advantageous to select a ngRNA spacer that has a PAM sequence compatible with the Cas9 protein used in the Prime Editor, thus avoiding the need to use two different Cas9 proteins. The ngRNA is capable of directing a complexed Cas9 protein to bind the edit strand of the USH2a gene; thus, a complexed Cas9 nickase containing a nuclease inactivating mutation in the HNH domain will nick the non-edit strand. A PE3 ngRNA spacer has perfect complementarity to the edit strand both pre- and post-edit; a PE3b ngRNA spacer has perfect complementarity to the edit strand post-edit.

[0390] Table 38 provides Prime Editing guide RNAs (PEgRNAs) that can be used with any Prime Editor containing a Cas9 protein capable of recognizing a TG or TGA PAM sequence. The PEgRNAs of Table 38 can also be used in Prime Editing systems further comprising a nick guide RNA (ngRNA). Such PEgRNAs and Prime Editing systems can be used, for example, to correct a c.2276 G->T mutation in USH2a.

[0391] The PEgRNAs exemplified in Table 38 comprise: (a) a spacer comprising at its 3′ end a sequence corresponding to sequence number 2087; (b) a gRNA core capable of complexing with a Cas9 protein, and (c) an extension arm comprising: (i) an editing template at least 14 nucleotides in length and comprising at its 3′ end a sequence corresponding to any one of sequence numbers 2093, 2096, 2097, or 2098, and (ii) a prime binding site (PBS) comprising at its 5′ end a sequence corresponding to sequence number 2072. The PEgRNA spacer can be, for example, 17-22 nucleotides in length and can comprise the sequence corresponding to any one of sequence numbers 2087, 2088, 2089, 2090, 2091, or 2092. In some embodiments, the PEgRNA spacer comprises sequence number 2090. The PEgRNA spacers in Table 38 are annotated with their PAM sequence(s), enabling the selection of an appropriate Cas9 protein. The editing template can be referred to as a reverse transcription template (RTT). The editing template can encode wildtype USH2a gene sequence. For example, the editing template can comprise at its 3′ end the sequence corresponding to sequence number 2093, 2094, 2095, 2099, 2103, 2107, 30, 2114, 2118, 2122, 2126, 2130, 2134, 2138, 2142, 2146, 2150, 2154, 2158, 2162, 2166, 2170, 2174, 2178, 2182, 2186, or 2190. Alternatively, the editing template can encode one or more synonymous mutations relative to the wildtype USH2a gene. The editing template can encode one or more synonymous mutations that are PAM silencing mutations and can comprise at its 3′ end the sequence corresponding to sequence number 2096, 2097, 2098, 2100, 2101, 2102, 2104, 2105, 2106, 2108, 2109, 2110, 2111, 2112, 2113, 2115, 2116, 2117, 2119, 2120, 2121, 2123, 2124, 2125, 2127, 2128, 2129, 2131, 2132, 2133, 2135, 2136, 2137, 2139, 2140, 2141, 2143, 2144, 2145, 2147, 2148, 2149, 2151, 2152, 2153, 2155, 2156, 2157, 2159, 2160, 2161, 2163, 2164, 2165, 2167, 2168, 2169, 2171, 2172, 2173, 2175, 2176, 2177, 2179, 2180, 2181, 2183, 2184, 2185, 2187, 2188, or 2189. The PBS can be, for example, 5 to 19 nucleotides in length and can comprise the sequence corresponding to any one of sequence numbers 2072, 2073, 2074, 2075, 2076, 2077, 2078, 2079, 2080, 2081, 2082, 2083, 2084, 2085, or 2086.

[0392] The PEgRNA can comprise, from 5′ to 3′, the spacer, the gRNA core, the edit template, and the PBS. The 3′ end of the edit template can be contiguous with the 5′ end of the PBS. The PEgRNA can comprise multiple RNA molecules or can be a single RNA molecule. Exemplary PEgRNAs provided in Table 38 can comprise a sequence corresponding to any one of sequence numbers 2191 to 3086 or 7523 to 7534. Any PEgRNA exemplified in Table 38 may comprise, or further comprise, a 3′ motif at the 3′ end of the extension arm, for example, a hairpin-forming motif or a series of 1, 2, 3, 4, 5, 6, 7 or more U nucleotides. In some embodiments, the PEgRNA comprises 4 U nucleotides at its 3′ end. Without being bound by theory, such 3′ motifs are believed to increase PEgRNA stability. The PEgRNA may alternatively or additionally comprise one or more chemical modifications, such as phosphorothioate (PS) bond(s), 2′-O-methylated (2′-Ome) nucleotides, or a combination thereof. In some embodiments, the PEgRNA comprise 3′ mN*mN*mN*N and 5′mN*mN*mN* modifications, where m indicates that the nucleotide contains a 2′-O-Me modification and a * indicates the presence of a phosphorothioate bond. PEgRNA sequences exemplified in Table 38 may alternatively be adapted for expression from a DNA template, for example, by including a 5′ terminal G if the spacer of the PEgRNA begins with another nucleotide, by including 6 or 7 U nucleotides at the 3′ end of the extension arm, or both. Such expression-adapted sequences may further comprise a hairpin-forming motif between the PBS and the 3′ terminal U series.

[0393] Any of the PEgRNAs of Table 38 can be used in a Prime Editing system further comprising a nick guide RNA (ngRNA). Such ngRNA can comprise a spacer comprising at its 3′ end a sequence corresponding to nucleotides 4-20 of any ngRNA spacer listed in Table 38 and a gRNA core capable of complexing with a Cas9 protein. For example, the sequence in the spacer of the ngRNA can comprise nucleotides 4-20, 3-20, 2-20, or 1-20 of sequence number 30, 31, 33, 34, 138, 35, 36, 139, 37, 38, 39, 41, 43, 44, 140, 48, 49, 51, 52, 53, or 54. In some embodiments, the spacer of the ngRNA is a ngRNA spacer listed in Table 38. The ngRNA spacers in Table 38 are annotated with their PAM sequences, enabling selection of an appropriate Cas9 protein. It can be advantageous to select a ngRNA spacer that has a PAM sequence compatible with the Cas9 protein used in the Prime Editor, thus avoiding the need to use two different Cas9 proteins. The ngRNA is capable of directing a complexed Cas9 protein to bind the edit strand of the USH2a gene; thus, a complexed Cas9 nickase containing a nuclease inactivating mutation in the HNH domain will nick the non-edit strand. A PE3 ngRNA spacer has perfect complementarity to the edit strand both pre- and post-edit; a PE3b ngRNA spacer has perfect complementarity to the edit strand post-edit. A PE3 or PE3b ngRNA spacer in Table 38 annotated with the same * and number code as an RTT in Table 38 has perfect complementarity to the edit strand post-edit by a PEgRNA containing the RTT.

[0394] Table 39 provides Prime Editing guide RNAs (PEgRNAs) that can be used with any Prime Editor containing a Cas9 protein capable of recognizing an AG PAM sequence. The PEgRNAs of Table 39 can also be used in Prime Editing systems further comprising a nick guide RNA (ngRNA). Such PEgRNAs and Prime Editing systems can be used, for example, to correct a c.2276 G->T mutation in USH2a.

[0395] The PEgRNAs exemplified in Table 39 comprise: (a) a spacer comprising at its 3′ end a sequence corresponding to sequence number 4496; (b) a gRNA core capable of complexing with a Cas9 protein, and (c) an extension arm comprising: (i) an editing template at least 38 nucleotides in length and comprising at its 3′ end a sequence corresponding to sequence number 4501, and (ii) a prime binding site (PBS) comprising at its 5′ end a sequence corresponding to sequence number 4481. The PEgRNA spacer can be, for example, 17-22 nucleotides in length and can comprise the sequence corresponding to any one of sequence numbers 4496, 4497, 4498, 51, 4499, or 4500. In some embodiments, the PEgRNA spacer comprises sequence number 51. The PEgRNA spacers in Table 39 are annotated with their PAM sequence(s), enabling the selection of an appropriate Cas9 protein. The editing template can be referred to as a reverse transcription template (RTT). The editing template can encode wildtype USH2a gene sequence. For example, the editing template can comprise at its 3′ end the sequence corresponding to sequence number 4501, 4502, or 4503. The PBS can be, for example, 5 to 19 nucleotides in length and can comprise the sequence corresponding to any one of sequence numbers 4481, 4482, 4483, 4484, 4485, 4486, 4487, 4488, 4489, 4490, 4491, 4492, 4493, 4494, or 4495. The PEgRNA can comprise, from 5′ to 3′, the spacer, the gRNA core, the edit template, and the PBS. The 3′ end of the edit template can be contiguous with the 5′ end of the PBS. The PEgRNA can comprise multiple RNA molecules or can be a single RNA molecule.

[0396] Any of the PEgRNAs of Table 39 can be used in a Prime Editing system further comprising a nick guide RNA (ngRNA). Such ngRNA can comprise a spacer comprising at its 3′ end a sequence corresponding to nucleotides 4-20 of any ngRNA spacer listed in Table 39 and a gRNA core capable of complexing with a Cas9 protein. For example, the sequence in the spacer of the ngRNA can comprise nucleotides 4-20, 3-20, 2-20, or 1-20 of sequence number 4, 58, 1898, 4508, 4509, 4510, 4511, 4512, 2008, 4513, 4514, 4515, 4516, 1676, 4517, 4518, 4519, 646, 617, 4520, 4521, 4522, 3564, 1736, 4523, 4524, 2090, 380, 1098, 4525, or 1324. In some embodiments, the spacer of the ngRNA is a ngRNA spacer listed in Table 39. The ngRNA spacers in Table 39 are annotated with their PAM sequences, enabling selection of an appropriate Cas9 protein. It can be advantageous to select a ngRNA spacer that has a PAM sequence compatible with the Cas9 protein used in the Prime Editor, thus avoiding the need to use two different Cas9 proteins. The ngRNA is capable of directing a complexed Cas9 protein to bind the edit strand of the USH2a gene; thus, a complexed Cas9 nickase containing a nuclease inactivating mutation in the HNH domain will nick the non-edit strand. A PE3 ngRNA spacer has perfect complementarity to the edit strand both pre- and post-edit; a PE3b ngRNA spacer has perfect complementarity to the edit strand post-edit. Exemplary ngRNA provided in Table 39 can comprise a sequence corresponding to sequence number 4504, 4505, 4506, or 4507.

[0397] Table 40 provides Prime Editing guide RNAs (PEgRNAs) that can be used with any Prime Editor containing a Cas9 protein capable of recognizing a TG or TGA PAM sequence. The PEgRNAs of Table 40 can also be used in Prime Editing systems further comprising a nick guide RNA (ngRNA). Such PEgRNAs and Prime Editing systems can be used, for example, to correct a c.2276 G->T mutation in USH2a.

[0398] The PEgRNAs exemplified in Table 40 comprise: (a) a spacer comprising at its 3′ end a sequence corresponding to sequence number 4541; (b) a gRNA core capable of complexing with a Cas9 protein, and (c) an extension arm comprising: (i) an editing template at least 17 nucleotides in length and comprising at its 3′ end a sequence corresponding to any one of sequence numbers 4546, 4549, 4550, or 4551, and (ii) a prime binding site (PBS) comprising at its 5′ end a sequence corresponding to sequence number 4526. The PEgRNA spacer can be, for example, 17-22 nucleotides in length and can comprise the sequence corresponding to any one of sequence numbers 4541, 4542, 4543, 48, 4544, or 4545. In some embodiments, the PEgRNA spacer comprises sequence number 48. The PEgRNA spacers in Table 40 are annotated with their PAM sequence(s), enabling the selection of an appropriate Cas9 protein. The editing template can be referred to as a reverse transcription template (RTT). The editing template can encode wildtype USH2a gene sequence. For example, the editing template can comprise at its 3′ end the sequence corresponding to sequence number 4546, 4547, 4548, 4511, 4553, 4557, 4561, 4565, 4569, 4573, 4577, 4581, 4585, 4589, 4593, 4597, 4601, 4605, 4609, 4613, 4617, 4621, 4625, or 4629. Alternatively, the editing template can encode one or more synonymous mutations relative to the wildtype USH2a gene. The editing template can encode one or more synonymous mutations that are PAM silencing mutations and can comprise at its 3′ end the sequence corresponding to sequence number 4549, 4550, 4551, 4552, 4554, 4555, 4556, 4558, 4559, 4560, 4562, 4563, 4564, 4566, 4567, 4568, 4570, 4571, 4572, 4574, 4575, 4576, 4578, 4579, 4580, 4582, 4583, 4584, 4586, 4587, 4588, 4590, 4591, 4592, 4594, 4595, 4596, 4598, 4599, 4600, 4602, 4603, 4604, 4606, 4607, 4608, 4610, 4611, 4612, 4614, 4615, 4616, 4618, 4619, 4620, 4622, 4623, 4624, 4626, 4627, 4628, 4630, or 4631. The PBS can be, for example, 5 to 19 nucleotides in length and can comprise the sequence corresponding to any one of sequence numbers 4526, 4527, 4528, 4529, 4530, 4531, 4532, 4533, 4534, 4535, 4536, 4537, 4538, 4539, or 4540.

[0399] The PEgRNA can comprise, from 5′ to 3′, the spacer, the gRNA core, the edit template, and the PBS. The 3′ end of the edit template can be contiguous with the 5′ end of the PBS. The PEgRNA can comprise multiple RNA molecules or can be a single RNA molecule. Exemplary PEgRNAs provided in Table 40 can comprise a sequence corresponding to any one of sequence numbers 4621 to 5806 or 7519 to 7522. Any PEgRNA exemplified in Table 40 may comprise, or further comprise, a 3′ motif at the 3′ end of the extension arm, for example, a hairpin-forming motif or a series of 1, 2, 3, 4, 5, 6, 7 or more U nucleotides. In some embodiments, the PEgRNA comprises 4 U nucleotides at its 3′ end. Without being bound by theory, such 3′ motifs are believed to increase PEgRNA stability. The PEgRNA may alternatively or additionally comprise one or more chemical modifications, such as phosphorothioate (PS) bond(s), 2′-O-methylated (2′-Ome) nucleotides, or a combination thereof. In some embodiments, the PEgRNA comprise 3′ mN*mN*mN*N and 5′mN*mN*mN* modifications, where m indicates that the nucleotide contains a 2′-O-Me modification and a * indicates the presence of a phosphorothioate bond. PEgRNA sequences exemplified in Table 40 may alternatively be adapted for expression from a DNA template, for example, by including a 5′ terminal G if the spacer of the PEgRNA begins with another nucleotide, by including 6 or 7 U nucleotides at the 3′ end of the extension arm, or both. Such expression-adapted sequences may further comprise a hairpin-forming motif between the PBS and the 3′ terminal U series.

[0400] Any of the PEgRNAs of Table 40 can be used in a Prime Editing system further comprising a nick guide RNA (ngRNA). Such ngRNA can comprise a spacer comprising at its 3′ end a sequence corresponding to nucleotides 4-20 of any ngRNA spacer listed in Table 40 and a gRNA core capable of complexing with a Cas9 protein. For example, the sequence in the spacer of the ngRNA can comprise nucleotides 4-20, 3-20, 2-20, or 1-20 of sequence number 4, 58, 1898, 4509, 4510, 4549, 4511, 4550, 4551, 2008, 4634, 4635, 1676, 4519, 646, 4636, 4522, 4637, 4638, 4639, 3564, 1736, 4640, 2090, 380, 1098, or 1324. In some embodiments, the spacer of the ngRNA is a ngRNA spacer listed in Table 40. The ngRNA spacers in Table 40 are annotated with their PAM sequences, enabling selection of an appropriate Cas9 protein. It can be advantageous to select a ngRNA spacer that has a PAM sequence compatible with the Cas9 protein used in the Prime Editor, thus avoiding the need to use two different Cas9 proteins. The ngRNA is capable of directing a complexed Cas9 protein to bind the edit strand of the USH2a gene; thus, a complexed Cas9 nickase containing a nuclease inactivating mutation in the HNH domain will nick the non-edit strand. A PE3 ngRNA spacer has perfect complementarity to the edit strand both pre- and post-edit; a PE3b ngRNA spacer has perfect complementarity to the edit strand post-edit. A PE3 or PE3b ngRNA spacer in Table 40 annotated with the same * and number code as an RTT in Table 40 has perfect complementarity to the edit strand post-edit by a PEgRNA containing the RTT. Exemplary ngRNA provided in Table 40 can comprise a sequence corresponding to sequence number 4504, 4632, 4505, 4506, 4633, or 4507.

[0401] Table 41 provides Prime Editing guide RNAs (PEgRNAs) that can be used with any Prime Editor containing a Cas9 protein capable of recognizing an AG PAM sequence. The PEgRNAs of Table 41 can also be used in Prime Editing systems further comprising a nick guide RNA (ngRNA). Such PEgRNAs and Prime Editing systems can be used, for example, to correct a c.2276 G->T mutation in USH2a.

[0402] The PEgRNAs exemplified in Table 41 comprise: (a) a spacer comprising at its 3′ end a sequence corresponding to sequence number 5822; (b) a gRNA core capable of complexing with a Cas9 protein, and (c) an extension arm comprising: (i) an editing template at least 19 nucleotides in length and comprising at its 3′ end a sequence corresponding to sequence number 5827, and (ii) a prime binding site (PBS) comprising at its 5′ end a sequence corresponding to sequence number 5807. The PEgRNA spacer can be, for example, 17-22 nucleotides in length and can comprise the sequence corresponding to any one of sequence numbers 5822, 5823, 5824, 37, 5825, or 5826. In some embodiments, the PEgRNA spacer comprises sequence number 37. The PEgRNA spacers in Table 41 are annotated with their PAM sequence(s), enabling the selection of an appropriate Cas9 protein. The editing template can be referred to as a reverse transcription template (RTT). The editing template can encode wildtype USH2a gene sequence. For example, the editing template can comprise at its 3′ end the sequence corresponding to sequence number 5827, 5828, 5829, 5830, 5831, 5832, 5833, 5834, 5835, 5836, 5837, 5838, 5839, 5840, 5841, 5842, 5843, 5844, 5845, 5846, 5847, or 5848. The PBS can be, for example, 5 to 19 nucleotides in length and can comprise the sequence corresponding to any one of sequence numbers 5807, 5808, 5809, 5810, 5811, 5812, 5813, 5814, 5815, 5816, 5817, 5818, 5819, 5820, or 5821. The PEgRNA can comprise, from 5′ to 3′, the spacer, the gRNA core, the edit template, and the PBS. The 3′ end of the edit template can be contiguous with the 5′ end of the PBS. The PEgRNA can comprise multiple RNA molecules or can be a single RNA molecule.

[0403] Any of the PEgRNAs of Table 41 can be used in a Prime Editing system further comprising a nick guide RNA (ngRNA). Such ngRNA can comprise a spacer comprising at its 3′ end a sequence corresponding to nucleotides 4-20 of any ngRNA spacer listed in Table 41 and a gRNA core capable of complexing with a Cas9 protein. For example, the sequence in the spacer of the ngRNA can comprise nucleotides 4-20, 3-20, 2-20, or 1-20 of sequence number 4, 58, 1898, 4508, 4509, 4510, 4511, 2008, 4634, 4635, 1676, 4519, 646, 4522, 4639, 3564, 1736, 4640, 2090, 380, 1098, or 1324. In some embodiments, the spacer of the ngRNA is a ngRNA spacer listed in Table 41. The ngRNA spacers in Table 41 are annotated with their PAM sequences, enabling selection of an appropriate Cas9 protein. It can be advantageous to select a ngRNA spacer that has a PAM sequence compatible with the Cas9 protein used in the Prime Editor, thus avoiding the need to use two different Cas9 proteins. The ngRNA is capable of directing a complexed Cas9 protein to bind the edit strand of the USH2a gene; thus, a complexed Cas9 nickase containing a nuclease inactivating mutation in the HNH domain will nick the non-edit strand. A PE3 ngRNA spacer has perfect complementarity to the edit strand both pre- and post-edit; a PE3b ngRNA spacer has perfect complementarity to the edit strand post-edit. Exemplary ngRNA provided in Table 41 can comprise a sequence corresponding to sequence number 4504, 4632, 4505, 4506, 4633, or 4507.

[0404] Table 42 provides Prime Editing guide RNAs (PEgRNAs) that can be used with any Prime Editor containing a Cas9 protein capable of recognizing a TG or TGG PAM sequence. The PEgRNAs of Table 42 can also be used in Prime Editing systems further comprising a nick guide RNA (ngRNA). Such PEgRNAs and Prime Editing systems can be used, for example, to correct a c.2276 G->T mutation in USH2a.

[0405] The PEgRNAs exemplified in Table 42 comprise: (a) a spacer comprising at its 3′ end a sequence corresponding to sequence number 5864; (b) a gRNA core capable of complexing with a Cas9 protein, and (c) an extension arm comprising: (i) an editing template at least 25 nucleotides in length and comprising at its 3′ end a sequence corresponding to sequence number 5869, and (ii) a prime binding site (PBS) comprising at its 5′ end a sequence corresponding to sequence number 5849. The PEgRNA spacer can be, for example, 17-22 nucleotides in length and can comprise the sequence corresponding to any one of sequence numbers 5864, 5865, 5866, 38, 5867, 5868. In some embodiments, the PEgRNA spacer comprises sequence number 38. The PEgRNA spacers in Table 42 are annotated with their PAM sequence(s), enabling the selection of an appropriate Cas9 protein. The editing template can be referred to as a reverse transcription template (RTT). The editing template can encode wildtype USH2a gene sequence. For example, the editing template can comprise at its 3′ end the sequence corresponding to sequence number 5869, 5870, 5871, 5872, 5873, 5874, 5875, 5876, 5877, 5878, 5879, 5880, 5881, 5882, 5883, or 5884. The PBS can be, for example, 5 to 19 nucleotides in length and can comprise the sequence corresponding to any one of sequence numbers 5849, 5850, 5851, 5852, 5853, 5854, 5855, 5856, 5857, 5858, 5859, 5860, 5861, 5862, or 5863.

[0406] The PEgRNA can comprise, from 5′ to 3′, the spacer, the gRNA core, the edit template, and the PBS. The 3′ end of the edit template can be contiguous with the 5′ end of the PBS. The PEgRNA can comprise multiple RNA molecules or can be a single RNA molecule. Exemplary PEgRNAs provided in Table 42 can comprise a sequence corresponding to any one of sequence numbers 5885 to 5916 or 7515 to 7518. Any PEgRNA exemplified in Table 42 may comprise, or further comprise, a 3′ motif at the 3′ end of the extension arm, for example, a hairpin-forming motif or a series of 1, 2, 3, 4, 5, 6, 7 or more U nucleotides. In some embodiments, the PEgRNA comprises 4 U nucleotides at its 3′ end. Without being bound by theory, such 3′ motifs are believed to increase PEgRNA stability. The PEgRNA may alternatively or additionally comprise one or more chemical modifications, such as phosphorothioate (PS) bond(s), 2′-O-methylated (2′-Ome) nucleotides, or a combination thereof. In some embodiments, the PEgRNA comprise 3′ mN*mN*mN*N and 5′mN*mN*mN* modifications, where m indicates that the nucleotide contains a 2′-O-Me modification and a * indicates the presence of a phosphorothioate bond. PEgRNA sequences exemplified in Table 42 may alternatively be adapted for expression from a DNA template, for example, by including a 5′ terminal G if the spacer of the PEgRNA begins with another nucleotide, by including 6 or 7 U nucleotides at the 3′ end of the extension arm, or both. Such expression-adapted sequences may further comprise a hairpin-forming motif between the PBS and the 3′ terminal U series.

[0407] Any of the PEgRNAs of Table 42 can be used in a Prime Editing system further comprising a nick guide RNA (ngRNA). Such ngRNA can comprise a spacer comprising at its 3′ end a sequence corresponding to nucleotides 4-20 of any ngRNA spacer listed in Table 42 and a gRNA core capable of complexing with a Cas9 protein. For example, the sequence in the spacer of the ngRNA can comprise nucleotides 4-20, 3-20, 2-20, or 1-20 of sequence number 4, 58, 1898, 4508, 4509, 4510, 4511, 4512, 2008, 4634, 4635, 1676, 4519, 646, 617, 4522, 3564, 1736, 4640, 2090, 380, 1098, 4525, or 1324. In some embodiments, the spacer of the ngRNA is a ngRNA spacer listed in Table 42. The ngRNA spacers in Table 42 are annotated with their PAM sequences, enabling selection of an appropriate Cas9 protein. It can be advantageous to select a ngRNA spacer that has a PAM sequence compatible with the Cas9 protein used in the Prime Editor, thus avoiding the need to use two different Cas9 proteins. The ngRNA is capable of directing a complexed Cas9 protein to bind the edit strand of the USH2a gene; thus, a complexed Cas9 nickase containing a nuclease inactivating mutation in the HNH domain will nick the non-edit strand. A PE3 ngRNA spacer has perfect complementarity to the edit strand both pre- and post-edit; a PE3b ngRNA spacer has perfect complementarity to the edit strand post-edit. Exemplary ngRNA provided in Table 42 can comprise a sequence corresponding to sequence number 4504, 4632, 4505, 4506, 4633, or 4507.

[0408] Table 43 provides Prime Editing guide RNAs (PEgRNAs) that can be used with any Prime Editor containing a Cas9 protein capable of recognizing a GG PAM sequence. The PEgRNAs of Table 43 can also be used in Prime Editing systems further comprising a nick guide RNA (ngRNA). Such PEgRNAs and Prime Editing systems can be used, for example, to correct a c.2276 G->T mutation in USH2a.

[0409] The PEgRNAs exemplified in Table 43 comprise: (a) a spacer comprising at its 3′ end a sequence corresponding to sequence number 5991; (b) a gRNA core capable of complexing with a Cas9 protein, and (c) an extension arm comprising: (i) an editing template at least 24 nucleotides in length and comprising at its 3′ end a sequence corresponding to sequence number 5996, and (ii) a prime binding site (PBS) comprising at its 5′ end a sequence corresponding to sequence number 5976. The PEgRNA spacer can be, for example, 17-22 nucleotides in length and can comprise the sequence corresponding to any one of sequence numbers 5991, 5992, 5993, 39, 5994, or 5995. In some embodiments, the PEgRNA spacer comprises sequence number 39. The PEgRNA spacers in Table 43 are annotated with their PAM sequence(s), enabling the selection of an appropriate Cas9 protein. The editing template can be referred to as a reverse transcription template (RTT). The editing template can encode wildtype USH2a gene sequence. For example, the editing template can comprise at its 3′ end the sequence corresponding to sequence number 5996, 5997, 5998, 5999, 6000, 6001, 6002, 6003, 6004, 6005, 6006, 6007, 6008, 6009, 6010, 6011, or 6012. The PBS can be, for example, 5 to 19 nucleotides in length and can comprise the sequence corresponding to any one of sequence numbers 5976, 5977, 5978, 5979, 5980, 5981, 5982, 5983, 5984, 5985, 5986, 5987, 5988, 5989, or 5990. The PEgRNA can comprise, from 5′ to 3′, the spacer, the gRNA core, the edit template, and the PBS. The 3′ end of the edit template can be contiguous with the 5′ end of the PBS. The PEgRNA can comprise multiple RNA molecules or can be a single RNA molecule.

[0410] Any of the PEgRNAs of Table 43 can be used in a Prime Editing system further comprising a nick guide RNA (ngRNA). Such ngRNA can comprise a spacer comprising at its 3′ end a sequence corresponding to nucleotides 4-20 of any ngRNA spacer listed in Table 43 and a gRNA core capable of complexing with a Cas9 protein. For example, the sequence in the spacer of the ngRNA can comprise nucleotides 4-20, 3-20, 2-20, or 1-20 of sequence number 4, 58, 1898, 4508, 4509, 4510, 4511, 4512, 2008, 4634, 4635, 1676, 4519, 646, 617, 4522, 4639, 3564, 1736, 4640, 2090, 380, 1098, 4525, or 1324. In some embodiments, the spacer of the ngRNA is a ngRNA spacer listed in Table 43. The ngRNA spacers in Table 43 are annotated with their PAM sequences, enabling selection of an appropriate Cas9 protein. It can be advantageous to select a ngRNA spacer that has a PAM sequence compatible with the Cas9 protein used in the Prime Editor, thus avoiding the need to use two different Cas9 proteins. The ngRNA is capable of directing a complexed Cas9 protein to bind the edit strand of the USH2a gene; thus, a complexed Cas9 nickase containing a nuclease inactivating mutation in the HNH domain will nick the non-edit strand. A PE3 ngRNA spacer has perfect complementarity to the edit strand both pre- and post-edit; a PE3b ngRNA spacer has perfect complementarity to the edit strand post-edit. Exemplary ngRNA provided in Table 43 can comprise a sequence corresponding to sequence number 1324, 4504, 4632, 4505, 4506, 4633, or 4507.

[0411] Table 44 provides Prime Editing guide RNAs (PEgRNAs) that can be used with any Prime Editor containing a Cas9 protein capable of recognizing a TG PAM sequence. The PEgRNAs of Table 44 can also be used in Prime Editing systems further comprising a nick guide RNA (ngRNA). Such PEgRNAs and Prime Editing systems can be used, for example, to correct a c.2276 G->T mutation in USH2a.

[0412] The PEgRNAs exemplified in Table 44 comprise: (a) a spacer comprising at its 3′ end a sequence corresponding to sequence number 7084; (b) a gRNA core capable of complexing with a Cas9 protein, and (c) an extension arm comprising: (i) an editing template at least 36 nucleotides in length and comprising at its 3′ end a sequence corresponding to any one of sequence numbers 7089, and (ii) a prime binding site (PBS) comprising at its 5′ end a sequence corresponding to sequence number 7069. The PEgRNA spacer can be, for example, 17-22 nucleotides in length and can comprise the sequence corresponding to any one of sequence numbers 7084, 7085, 7086, 52, 7087, or 7088. In some embodiments, the PEgRNA spacer comprises sequence number 52. The PEgRNA spacers in Table 44 are annotated with their PAM sequence(s), enabling the selection of an appropriate Cas9 protein. The editing template can be referred to as a reverse transcription template (RTT). The editing template can encode wildtype USH2a gene sequence. For example, the editing template can comprise at its 3′ end the sequence corresponding to sequence number 7089, 7090, 7091, 7092, or 7093. The PBS can be, for example, 5 to 19 nucleotides in length and can comprise the sequence corresponding to any one of sequence numbers 7069, 7070, 7071, 7072, 7073, 7074, 7075, 7076, 7077, 7078, 7079, 7080, 7081, 7082, or 7083. The PEgRNA can comprise, from 5′ to 3′, the spacer, the gRNA core, the edit template, and the PBS. The 3′ end of the edit template can be contiguous with the 5′ end of the PBS. The PEgRNA can comprise multiple RNA molecules or can be a single RNA molecule.

[0413] Any of the PEgRNAs of Table 44 can be used in a Prime Editing system further comprising a nick guide RNA (ngRNA). Such ngRNA can comprise a spacer comprising at its 3′ end a sequence corresponding to nucleotides 4-20 of any ngRNA spacer listed in Table 44 and a gRNA core capable of complexing with a Cas9 protein. For example, the sequence in the spacer of the ngRNA can comprise nucleotides 4-20, 3-20, 2-20, or 1-20 of sequence number 4, 58, 1898, 4508, 4509, 4510, 4511, 4512, 2008, 4634, 4515, 4635, 1676, 4517, 4519, 646, 617, 4520, 4522, 3564, 1736, 4523, 2090, 380, 1098, 4525, or 1324. In some embodiments, the spacer of the ngRNA is a ngRNA spacer listed in Table 44. The ngRNA spacers in Table 44 are annotated with their PAM sequences, enabling selection of an appropriate Cas9 protein. It can be advantageous to select a ngRNA spacer that has a PAM sequence compatible with the Cas9 protein used in the Prime Editor, thus avoiding the need to use two different Cas9 proteins. The ngRNA is capable of directing a complexed Cas9 protein to bind the edit strand of the USH2a gene; thus, a complexed Cas9 nickase containing a nuclease inactivating mutation in the HNH domain will nick the non-edit strand. A PE3 ngRNA spacer has perfect complementarity to the edit strand both pre- and post-edit; a PE3b ngRNA spacer has perfect complementarity to the edit strand post-edit. Exemplary ngRNA provided in Table 44 can comprise a sequence corresponding to sequence number 4504, 4632, 4505, 4506, 4633, or 4507.

### Pharmaceutical Compositions

[0414] Disclosed herein are pharmaceutical compositions comprising any of the prime editing composition components, for example, prime editors, fusion proteins, polynucleotides encoding prime editor polypeptides, PEgRNAs, ngRNAs, and/or prime editing complexes described herein.

[0415] The term “pharmaceutical composition”, as used herein, refers to a composition formulated for pharmaceutical use. In some embodiments, the pharmaceutical composition further comprises a pharmaceutically acceptable carrier. In some embodiments, the pharmaceutical composition comprises additional agents, e.g., for specific delivery, increasing half-life, or other therapeutic compounds.

[0416] In some embodiments, a pharmaceutically-acceptable carrier comprises any vehicle, such as a liquid or solid filler, diluent, excipient, manufacturing aid (e.g., lubricant, tale magnesium, calcium or zinc stearate, or steric acid), or solvent encapsulating material, involved in carrying or transporting the compound from one site (e.g., the delivery site) of the body, to another site (e.g., organ, tissue or portion of the body). A pharmaceutically acceptable carrier is “acceptable” in the sense of being compatible with the other ingredients of the formulation and not injurious to the tissue of the subject (e.g., physiologically compatible, sterile, physiologic pH, etc.)

[0417] Formulations of the pharmaceutical compositions described herein can be prepared by any method known or hereafter developed in the art of pharmacology. In general, such preparatory methods include the step of bringing the active ingredient(s) into association with an excipient and/or one or more other accessory ingredients, and then, if necessary and/or desirable, shaping and/or packaging the product into a desired single- or multi-dose unit. Pharmaceutical formulations can additionally comprise a pharmaceutically acceptable excipient, which, as used herein, includes any and all solvents, dispersion media, diluents, or other liquid vehicles, dispersion or suspension aids, surface active agents, isotonic agents, thickening or emulsifying agents, preservatives, solid binders, lubricants and the like, as suited to the particular dosage form desired.

### Methods of Editing

[0418] The methods and compositions disclosed herein can be used to edit a target gene of interest by prime editing.

[0419] In some embodiments, the prime editing method comprises contacting a target gene, e.g., an USH2A gene, with a PEgRNA and a prime editor (PE) polypeptide described herein. In some embodiments, the target gene is double stranded, and comprises two strands of DNA complementary to each other. In some embodiments, the contacting with a PEgRNA and the contacting with a prime editor are performed sequentially. In some embodiments, the contacting with a prime editor is performed after the contacting with a PEgRNA. In some embodiments, the contacting with a PEgRNA is performed after the contacting with a prime editor. In some embodiments, the contacting with a PEgRNA, and the contacting with a prime editor are performed simultaneously. In some embodiments, the PEgRNA and the prime editor are associated in a complex prior to contacting a target gene.

[0420] In some embodiments, contacting the target gene with the prime editing composition results in binding of the PEgRNA to a target strand of the target gene, e.g., an USH2A gene. In some embodiments, contacting the target gene with the prime editing composition results in binding of the PEgRNA to a search target sequence on the target strand of the target gene upon contacting with the PEgRNA. In some embodiments, contacting the target gene with the prime editing composition results in binding of a spacer sequence of the PEgRNA to a search target sequence with the search target sequence on the target strand of the target gene upon said contacting of the PEgRNA.

[0421] In some embodiments, contacting the target gene with the prime editing composition results in binding of the prime editor to the target gene, e.g., the target USH2A gene, upon the contacting of the PE composition with the target gene. In some embodiments, the DNA binding domain of the PE associates with the PEgRNA. In some embodiments, the PE binds the target gene, e.g., an USH2A gene, directed by the PEgRNA. Accordingly, in some embodiments, the contacting of the target gene result in binding of a DNA binding domain of a prime editor of the target USH2A gene directed by the PEgRNA.

[0422] In some embodiments, contacting the target gene with the prime editing composition results in a nick in an edit strand of the target gene, e.g., an USH2A gene by the prime editor upon contacting with the target gene, thereby generating a nicked on the edit strand of the target gene. In some embodiments. contacting the target gene with the prime editing composition results in a single-stranded DNA comprising a free 3′ end at the nick site of the edit strand of the target gene. In some embodiments, contacting the target gene with the prime editing composition results in a nick in the edit strand of the target gene by a DNA binding domain of the prime editor, thereby generating a single-stranded DNA comprising a free 3′ end at the nick site. In some embodiments, the DNA binding domain of the prime editor is a Cas domain. In some embodiments, the DNA binding domain of the prime editor is a Cas9. In some embodiments, the DNA binding domain of the prime editor is a Cas9 nickase.

[0423] In some embodiments, contacting the target gene with the prime editing composition results in hybridization of the PEgRNA with the 3′ end of the nicked single-stranded DNA, thereby priming DNA polymerization by a DNA polymerase domain of the prime editor. In some embodiments, the free 3′ end of the single-stranded DNA generated at the nick site hybridizes to a primer binding site sequence (PBS) of the contacted PEgRNA, thereby priming DNA polymerization. In some embodiments, the DNA polymerization is reverse transcription catalyzed by a reverse transcriptase domain of the prime editor. In some embodiments, the method comprises contacting the target gene with a DNA polymerase, e.g., a reverse transcriptase, as a part of a prime editor fusion protein or prime editing complex (in cis), or as a separate protein (in trans).

[0424] In some embodiments, contacting the target gene with the prime editing composition generates an edited single stranded DNA that is coded by the editing template of the PEgRNA by DNA polymerase mediated polymerization from the 3′ free end of the single-stranded DNA at the nick site. In some embodiments, the editing template of the PEgRNA comprises one or more intended nucleotide edits compared to endogenous sequence of the target gene, e.g., an USH2A gene. In some embodiments, the intended nucleotide edits are incorporated in the target gene, by excision of the 5′ single stranded DNA of the edit strand of the target gene generated at the nick site and DNA repair. In some embodiments, the intended nucleotide edits are incorporated in the target gene by excision of the editing target sequence and DNA repair. In some embodiments, excision of the 5′ single stranded DNA of the edit strand generated at the nick site is by a flap endonuclease. In some embodiments, the flap nuclease is FEN]. In some embodiments, the method further comprises contacting the target gene with a flap endonuclease. In some embodiments, the flap endonuclease is provided as a pail of a prime editor fusion protein. In some embodiments, the flap endonuclease is provided in trans.

[0425] In some embodiments, contacting the target gene with the prime editing composition generates a mismatched heteroduplex comprising the edit strand of the target gene that comprises the edited single stranded DNA, and the unedited target strand of the target gene. Without being bound by theory, the endogenous DNA repair and replication may resolve the mismatched edited DNA to incorporate the nucleotide change(s) to form the desired edited target gene.

[0426] In some embodiments, the method further comprises contacting the target gene, e.g., an USH12A gene, with a nick guide (ngRNA) disclosed herein. In some embodiments, the ngRNA comprises a spacer that binds a second search target sequence on the edit strand of the target gene. In some embodiments, the contacted ngRNA directs the PE to introduce a nick in the target strand of the target gene. In some embodiments, the nick on the target strand (non-edit strand) results in endogenous DNA repair machinery to use the edit strand to repair the non-edit strand, thereby incorporating the intended nucleotide edit in both strand of the target gene and modifying the target gene. In some embodiments, the ngRNA comprises a spacer sequence that is complementary to, and may hybridize with, the second search target sequence on the edit strand only after the intended nucleotide edit(s) are incorporated in the edit strand of the target gene.

[0427] In some embodiments, the target gene is contacted by the ngRNA, the PEgRNA, and the PE simultaneously. In some embodiments, the ngRNA, the PEgRNA, and the PE form a complex when they contact the target gene. In some embodiments, the target gene is contacted with the ngRNA, the PEgRNA, and the prime editor sequentially. In some embodiments, the target gene is contacted with the ngRNA and/or the PEgRiNA after contacting the target gene with the PE. In some embodiments, the target gene is contacted with the ngRNA and/or the PEgRNA before contacting the target gene with the prime editor.

[0428] In some embodiments, the target gene, e.g., an USH2A gene, is in a cell. Accordingly, also provided herein are methods of modifying a cell.

[0429] In some embodiments, the prime editing method comprises introducing a PEgRNA, a prime editor, and/or a ngRNA into the cell that has the target gene. In some embodiments, the prime editing method comprises introducing into the cell that has the target gene with a prime editing composition comprising a PEgRNA, a prime editor polypeptide, and/or a ngRNA. In some embodiments, the PEgRNA, the prime editor polypeptide, and/or the ngRNA form a complex prior to the introduction into the cell. In some embodiments, the PEgRNA, the prime editor polypeptide, and/or the ngRNA form a complex after the introduction into the cell. The prime editors, PEgRNA and/or ngRNAs, and prime editing complexes may be introduced into the cell by any delivery approaches described herein or any delivery approach known in the art, including ribonucleoprotein (RNPs), lipid nanoparticles (LNPs). viral vectors, non-viral vectors, mRNA delivery, and physical techniques such as cell membrane disruption by a microfluidics device. The prime editors, PEgRNA and/or ngRNAs, and prime editing complexes may be introduced into the cell simultaneously or sequentially.

[0430] In some embodiments, the prime editing method comprises introducing into the cell a PEgRNA or a polynucleotide encoding the PEgRNA, a polynucleotide encoding a prime editor polypeptide, and optionally an ngRNA or a polynucleotide encoding the ngRNA. In some embodiments, the method comprises introducing the PEgRNA or the polynucleotide encoding the PEgRNA, the polynucleotide encoding the prime editor polypeptide, and/or the ngRNA or the polynucleotide encoding the ngRNA into the cell simultaneously. In soie embodiments, the method comprises introducing the PEgRNA or the polynucleotide encoding the PEgRNA, the polynucleotide encoding the prime editor polypeptide, and/or the ngRNA or the polynucleotide encoding the ngRN into the cell sequentially. In some embodiments, the method comprises introducing the polynucleotide encoding the prime editor poly peptide into the cell before introduction of the PEgRNA or the polynucleotide encoding the PEgRNA and/or the ngRNA or the polynucleotide encoding the ngRNA. In some embodiments, the polynucleotide encoding the prime editor polypeptide is introduced into and expressed in the cell before introduction of the PEgRNA or the polynucleotide encoding the PEgRNA and/or the ngRNA or the polynucleotide encoding the ngRNA into the cell. In some embodiments, the polynucleotide encoding the prime editor polypeptide is introduced into the cell after the PEgRNA or the polynucleotide encoding the PEgRNA and/or the ngRNA or the polynucleotide encoding the ngRNA are introduced into the cell. The polynucleotide encoding the prime editor polypeptide, the PEgRNA or the polynucleotide encoding the PEgRNA, and/or the ngRNA or the polynucleotide encoding the ngRN A may be introduced into the cell by any delivery approaches described herein or any delivery approach known in the art, for example, by RNPs, LNPs, viral vectors, non-viral vectors. mRNA delivery, and physical. In some embodiments, the polynicleotide is a DNA polynucleotide. In some embodiments, the polynucleotide is a RNA polynucleotide, e.g., mRNA polynucleotide.

[0431] In some embodiments, the polynucleotide encoding the prime editor polypeptide, the polynucleotide encoding the PEgRNA, and/or the polynucleotide encoding the ngRNA integrate into the genome of the cell after being introduced into the cell. In some embodiments, the polynucleotide encoding the prime editor polypeptide, the polynucleotide encoding the PEgRNA. and/or the polynucleotide encoding the ngRNA are introduced into the cell for transient expression. Accordingly, also provided herein are cells modified by prime editing.

[0432] In some embodiments, the cell is a prokaryotic cell. In some embodiments, the cell is a eukaryotic cell. In some embodiments, the cell is a mammalian cell. In some embodiments, the cell is a non-human primate cell, bovine cell, porcine cell, rodent or mouse cell. In some embodiments, the cell is a human cell. In some embodiments, the cell is a primary cell. In some embodiments, the cell is a human primary cell. In some embodiments, the cell is a progenitor cell. In some embodiments, the cell is a human progenitor cell. In some embodiments, the cell is a stem cell. In some embodiments, the cell is a human stem cell. In some embodiments, the cell is an induced pluripotent stem cell (iPSC). In some embodiments, the cell is a human iPSC. In some embodiments, the cell is a neuron. In some embodiments, the cell is a neuron from basal ganglia. In some embodiments, the cell is a neuron from basal ganglia of a subject. In some embodiments, the cell is at least one of: Miller cells, astrocytes, or microglia. In some embodiments, the cell edited by prime editing can be differentiated into, or give rise to recovery of a population of cells, e.g., sensory ciliated cells, retinal cells, photoreceptor cells, rod cells, cone cells, hair cells, post-natal hair cells, human sensory ciliated cells, human retinal cells, human photoreceptor cells, human rod cells, human cone cells, human hair cells, or human post-natal hair cells.

[0433] In some embodiments, the cell is an ex vivo cell. In some embodiments, the cell is an ex vivo cell obtained from a human subject. For example, in some embodiments, the cell is a stem cell, a progenitor cell obtained from a subject having Usher syndrome type 2 disease prior to editing. After correction of the mutation by prime editing, the cell may be administered to the subject. In some embodiments, the cell is in a subject, e.g., a human subject.

[0434] In some embodiments, the target gene edited by prime editing is in a chromosome of the cell. In some embodiments, the intended nucleotide edits incorporate in the chromosome of the cell and are inheritable by progeny cells. In some embodiments, the intended nucleotide edits introduced to the cell by the prime editing compositions and methods are such that the cell and progeny of the cell also include the intended nucleotide edits. In some embodiments, the cell is autologous, allogeneic, or xenogeneic to a subject. In some embodiments, the cell is from or derived from a subject. In some embodiments, the cell is from or derived from a human subject. In sonic embodiments, the cell is introduced back into the subject, e.g., a human subject, after incorporation of the intended nucleotide edits by prime editing.

[0435] In some embodiments, the method provided herein comprises introducing the prime editor polypeptide or the polynucleotide encoding the prime editor polypeptide, the PEgRNA or the polynucleotide encoding the PEgRNA, and/or the ngRNA or the polynucleotide encoding the ngRNA into a plurality or a population of cells that comprise the target gene. In sonic embodiments, the population of cells is of the same cell type. In some embodiments, the population of cells is of the same tissue or organ. In some embodiments, the population of cells is heterogeneous. In some embodiments, the population of cells is homogeneous. In some embodiments, the population of cells is from a single tissue or organ, and the cells are heterogeneous. In some embodiments, the introduction into the population of cells is ex vivo. In some embodiments, the introduction into the population of cells is in vivo, e.g., into a human subject.

[0436] In some embodiments, the target gene is in a genome of each cell of the population. In some embodiments, introduction of the prime editor polypeptide or the polynucleotide encoding the prime editor polypeptide, the PEgRNA or the polynucleotide encoding the PEgRNA, and/or the ngRNA or the polynucleotide encoding the ngRNA results in incorporation of one or more intended nucleotide edits in the target gene in at least one of the cells in the population of cells. In some embodiments, introduction of the prime editor polypeptide or the polynucleotide encoding the prime editor polypeptide, the PEgRNA or the polynucleotide encoding the PEgRNA, and/or the ngRNA or the polynucleotide encoding the ngRNA results in incorporation of the one or more intended nucleotide edits in the target gene in a plurality of the population of cells. In some embodiments, introduction of the prime editor polypeptide or the polynucleotide encoding the prime editor polypeptide, the PEgRiNA or the polynucleotide encoding the PEgRNA, and/or the ngRNA or the polynucleotide encoding the ngRNA results in incorporation of the one or more intended nucleotide edits in the target gene in each cell of the population of cells. In some embodiments, introduction of the prime editor polypeptide or the polynucleotide encoding the prime editor polypeptide, the PEgRNA or the polynucleotide encoding the PEgRNA, and/or the ngRNA or the polynucleotide encoding the ngRNA results in incorporation of the one or more intended nucleotide edits in the target gene in sufficient number of cells such that the disease or disorder is treated, prevented or ameliorated.

[0437] In some embodiments, editing efficiency of the prime editing compositions and method described herein can be measured by calculating the percentage of edited target genes in a population of cells introduced with the prime editing composition. In some embodiments, the editing efficiency is determined after 1 hour, 2 hours, 6 hours, 12 hours, 24 hours. 36 hours, 48 hours, 3 days, 4 days. 5 days, 7 days, 10 days, or 14 days of exposing a target gene (e.g., a USH2A gene within the genome of a cell) to a prime editing composition. In some embodiments, editing efficiency of the prime editing compositions and method described herein can be measured by calculating the percentage of edited target genes in a population of cells introduced with the prime editing composition. In some embodiments, the editing efficiency is determined after 5, 6, 7, 8, 9, 10, 11, 12, 13, 14, 15. or 16 weeks of exposing a target gene (e.g., a USH2A gene within the genome of a cell) to a prime editing composition. In some embodiments, the population of cells introduced with the prime editing composition is ex vivo. In some embodiments, the population of cells introduced with the prime editing composition is in vitro. In some embodiments, the population of cells introduced with the prime editing composition is in vivo. In some embodiments, the prime editing methods disclosed herein have an editing efficiency of at least about 1%, at least about 5%, at least about 10%, at least about 20%, at least about 30%, at least about 40%, at least about 50%, at least about 60%, at least about 70%, at least about 80%, at least about 90%, at least about 95%, or at least about 99% relative to a suitable control. In some embodiments, the prime editing methods disclosed herein have an editing efficiency of at least 25% relative to a suitable control. In some embodiments, the prime editing methods disclosed herein have an editing efficiency of at least 35% relative to a suitable control. prime editing method disclosed herein has an editing efficiency of at least 30% relative to a suitable control. In some embodiments, the prime editing methods disclosed herein have an editing efficiency of at least 45% relative to a suitable control. In some embodiments, the prime editing methods disclosed herein have an editing efficiency of at least 50% relative to a suitable control. In some embodiments. editing efficiency of prime the prime editing compositions and method described herein can be measured by calculating the percentage of edited target genes in a population of cells after in vivo engraftment of the edited cells. In some embodiments, the editing efficiency is determined after 5, 6, 7, 8, 9, 10, 11, 12, 13, 14, 15, or 16 weeks of engraftment. In some embodiments, the editing efficiency is determined after 8 or 16 weeks of engraftment. In some embodiments, prime editing is able to maintain in edited cells at least about 10%, about 15%, about 20%, about 25%, about 30%, about 35%, about 40%, about 45%, about 50%, about 55%, about 60%, about 65%, about 70%, about 75%, about 80%, about 85%, about 90%, about 95% or more than 95% of editing efficiency after 8 or 16 weeks post engraftment.

[0438] In some embodiments, the methods disclosed herein have an editing efficiency of at least about 1%, at least about 5%, at least about 7.5%, at least about 10%, at least about 15%, at least about 20%, at least about 30%, at least about 40%, at least about 50%, at least about 60%, at least about 70%, at least about 80%, at least about 90%, or at least about 95% of editing a primary cell (as measured in a population of primary cells) relative to a suitable control.

[0439] In some embodiments, the methods disclosed herein have an editing efficiency of at least about 5%, at least about 7.5%, at least about 10%, at least about 15%, at least about 20%, at least about 30%, at least about 40%, at least about 50%, at least about 60%, at least about 70%, at least about 80%, at least about 90%, or at least about 95% of editing a hepatocyte relative to a corresponding control hepatocyte. In some embodiments, the hepatocyte is a human hepatocyte.

[0440] In some embodiments, the prime editing compositions provided herein are capable of incorporated one or more intended nucleotide edits without generating a significant proportion of indels. The term “indel(s)”, as used herein, refers to the insertion or deletion of a nucleotide base within a polynucleotide, for example, a target gene. Such insertions or deletions can lead to frame shift mutations within a coding region of a gene. Indel frequency of editing can be calculated by methods known in the art. In some embodiments, indel frequency can be calculated based on sequence alignment such as the CRISPResso 2 algorithm as described in Clement et al., Nat. Biotechnol. 37(3): 224-226 (2019), which is incorporatₑd herein in its entirety. In some embodiments, the prime editing methods disclosed herein can have an indel frequency of less than 30%, less than 20%, less than 10%, less than 9%, less than 8%, less than 7%, less than 6%, less than 5%, less than 4%, less than 3%, less than 2%, less than 1.5%, or less than 1%. In some embodiments, any number of indels is determined after at least 1 hour, at least 2 hours, at least 6 hours, at least 12 hours, at least 24 hours, at least 36 hours, at least 48 hours, at least 3 days, at least 4 days, at least 5 days, at least 7 days, at least 10 days, or at least 14 days of exposing a target gene (e.g., a USH2A gene within the genome of a cell) to a prime editing composition.

[0441] In some embodiments, the prime editing compositions provided herein are capable of incorporating one or more intended nucleotide edits efficiently without generating a significant proportion of indels. In some embodiments, the prime editing methods disclosed herein have an editing efficiency of at least about 1% and an indel frequency of less than 1% in a target cell, e.g., a human retinal cell, a human rod cell, a human cone cell, a human hair cell, or a human iPSCa human retinal cell, a human rod cell, a human cone cell, a human hair cell, or a human iPSC. In some embodiments, the prime editing methods disclosed herein have an editing efficiency of at least about 1% and an indel frequency of less than 0.5% in a target cell, e.g., a human retinal cell, a human rod cell, a human cone cell, a human hair cell, or a human iPSC. In some embodiments, the prime editing methods disclosed herein have an editing efficiency of at least about 1% and an indel frequency of less than 0.1% in a target cell, e.g., a human retinal cell, a human rod cell, a human cone cell, a human hair cell, or a human iPSC. In some embodiments, the prime editing methods disclosed herein have an editing efficiency of at least about 5% and an indel frequency of less than 1% in a target cell, e.g., a human retinal cell, a human rod cell, a human cone cell, a human hair cell, or a human iPSC. In some embodiments, the prime editing methods disclosed herein have an editing efficiency of at least about 5% and an indel frequency of less than 0.5% in a target cell, e.g., a human retinal cell, a human rod cell, a human cone cell, a human hair cell, or a human iPSC. In some embodiments, the prime editing methods disclosed herein have an editing efficiency of at least about 5% and an indel frequency of less than 0.1% in a target cell, e.g., a human retinal cell, a human rod cell, a human cone cell, a human hair cell, or a human iPSC.

[0442] In some embodiments, the prime editing methods disclosed herein have an editing efficiency of at least about 7.5% and an indel frequency of less than 1% in a target cell, e.g., a human retinal cell, a human rod cell, a human cone cell, a human hair cell, or a human iPSC. In some embodiments, the prime editing methods disclosed herein have an editing efficiency of at least about 7.5% and an indel frequency of less than 0.5% in a target cell, e.g., a human retinal cell, a human rod cell, a human cone cell, a human hair cell, or a human iPSC. In some embodiments, the prime editing methods disclosed herein have an editing efficiency of at least about 7.5% and an indel frequency of less than 0.1% in a target cell, e.g., a human retinal cell, a human rod cell, a human cone cell, a human hair cell, or a human iPSC.

[0443] In some embodiments, the prime editing methods disclosed herein have an editing efficiency of at least about 10% and an indel frequency of less than 1% in a target cell, e.g., a human retinal cell, a human rod cell, a human cone cell, a human hair cell, or a human iPSC. In some embodiments, the prime editing methods disclosed herein have an editing efficiency of at least about 10% and an indel frequency of less than 0.5% in a target cell, e.g., a human retinal cell, a human rod cell, a human cone cell, a human hair cell, or a human iPSC. In some embodiments, the prime editing methods disclosed herein have an editing efficiency of at least about 10% and an indel frequency of less than 0.1% in a target cell, e.g., a human retinal cell, a human rod cell, a human cone cell, a human hair cell, or a human iPSC.

[0444] In some embodiments, the prime editing methods disclosed herein have an editing efficiency of at least about 15% and an indel frequency of less than 1% in a target cell, e.g., a human retinal cell, a human rod cell, a human cone cell, a human hair cell, or a human iPSC. In some embodiments, the prime editing methods disclosed herein have an editing efficiency of at least about 15% and an indel frequency of less than 0.5% in a target cell, e.g., a human retinal cell, a human rod cell, a human cone cell, a human hair cell, or a human iPSC. In some embodiments, the prime editing methods disclosed herein have an editing efficiency of at least about 15% and an indel frequency of less than 0.1% in a target cell, e.g., a human retinal cell, a human rod cell, a human cone cell, a human hair cell, or a human iPSC.

[0445] In some embodiments, the prime editing methods disclosed herein have an editing efficiency of at least about 20% and an indel frequency of less than 1% in a target cell, e.g., a human retinal cell, a human rod cell, a human cone cell, a human hair cell, or a human iPSC. In some embodiments, the prime editing methods disclosed herein have an editing efficiency of at least about 20% and an indel frequency of less than 0.5% in a target cell, e.g., a human retinal cell, a human rod cell, a human cone cell, a human hair cell, or a human iPSC. In some embodiments, the prime editing methods disclosed herein have an editing efficiency of at least about 20% and an indel frequency of less than 0.1% in a target cell, e.g., a human retinal cell, a human rod cell, a human cone cell, a human hair cell, or a human iPSC.

[0446] In some embodiments, the prime editing methods disclosed herein have an editing efficiency of at least about 30% and an indel frequency of less than 1% in a target cell, e.g., a human retinal cell, a human rod cell, a human cone cell, a human hair cell, or a human iPSC. In some embodiments, the prime editing methods disclosed herein have an editing efficiency of at least about 30% and an indel frequency of less than 0.5% in a target cell, e.g., a human retinal cell, a human rod cell, a human cone cell, a human hair cell, or a human iPSC. In some embodiments, the prime editing methods disclosed herein have an editing efficiency of at least about 30% and an indel frequency of less than 0.1% in a target cell, e.g., a human retinal cell, a human rod cell, a human cone cell, a human hair cell, or a human iPSC.

[0447] In some embodiments, the prime editing methods disclosed herein have an editing efficiency of at least about 40% and an indel frequency of less than 1% in a target cell, e.g., a human retinal cell, a human rod cell, a human cone cell, a human hair cell, or a human iPSC. In some embodiments, the prime editing methods disclosed herein have an editing efficiency of at least about 40% and an indel frequency of less than 0.5% in a target cell, e.g., a human retinal cell, a human rod cell, a human cone cell, a human hair cell, or a human iPSC. In some embodiments, the prime editing methods disclosed herein have an editing efficiency of at least about 40% and an indel frequency of less than 0.1% in a target cell, e.g., a human retinal cell, a human rod cell, a human cone cell, a human hair cell, or a human iPSC.

[0448] In some embodiments, the prime editing methods disclosed herein have an editing efficiency of at least about 50% and an indel frequency of less than 1% in a target cell, e.g., a human retinal cell, a human rod cell, a human cone cell, a human hair cell, or a human iPSC. In some embodiments, the prime editing methods disclosed herein have an editing efficiency of at least about 50% and an indel frequency of less than 0.5% in a target cell, e.g., a human retinal cell, a human rod cell, a human cone cell, a human hair cell, or a human iPSC. In some embodiments, the prime editing methods disclosed herein have an editing efficiency of at least about 50% and an indel frequency of less than 0.1% in a target cell, e.g., a human retinal cell, a human rod cell, a human cone cell, a human hair cell, or a human iPSC.

[0449] In some embodiments, the prime editing methods disclosed herein have an editing efficiency of at least about 60% and an indel frequency of less than 1% in a target cell, e.g., a human retinal cell, a human rod cell, a human cone cell, a human hair cell, or a human iPSC. In some embodiments, the prime editing methods disclosed herein have an editing efficiency of at least about 60% and an indel frequency of less than 0.5% in a target cell, e.g., a human retinal cell, a human rod cell, a human cone cell, a human hair cell, or a human iPSC. In some embodiments, the prime editing methods disclosed herein have an editing efficiency of at least about 60% and an indel frequency of less than 0.1% in a target cell, e.g., a human retinal cell, a human rod cell, a human cone cell, a human hair cell, or a human iPSC.

[0450] In some embodiments, the prime editing methods disclosed herein have an editing efficiency of at least about 70% and an indel frequency of less than 1% in a target cell, e.g., a human retinal cell, a human rod cell, a human cone cell, a human hair cell, or a human iPSC. In some embodiments, the prime editing methods disclosed herein have an editing efficiency of at least about 70% and an indel frequency of less than 0.5% in a target cell, e.g., a human retinal cell, a human rod cell, a human cone cell, a human hair cell, or a human iPSC. In some embodiments, the prime editing methods disclosed herein have an editing efficiency of at least about 70% and an indel frequency of less than 0.1% in a target cell, e.g., a human retinal cell, a human rod cell, a human cone cell, a human hair cell, or a human iPSC.

[0451] In some embodiments, the prime editing methods disclosed herein have an editing efficiency of at least about 80% and an indel frequency of less than 1% in a target cell, e.g., a human retinal cell, a human rod cell, a human cone cell, a human hair cell, or a human iPSC. In some embodiments, the prime editing methods disclosed herein have an editing efficiency of at least about 80% and an indel frequency of less than 0.5% in a target cell, e.g., a human retinal cell, a human rod cell, a human cone cell, a human hair cell, or a human iPSC. In some embodiments, the prime editing methods disclosed herein have an editing efficiency of at least about 80% and an indel frequency of less than 0.1% in a target cell, e.g., a human retinal cell, a human rod cell, a human cone cell, a human hair cell, or a human iPSC.

[0452] In some embodiments, the prime editing methods disclosed herein have an editing efficiency of at least about 90% and an indel frequency of less than 1% in a target cell, e.g., a human retinal cell, a human rod cell, a human cone cell, a human hair cell, or a human iPSC. In some embodiments, the prime editing methods disclosed herein have an editing efficiency of at least about 90% and an indel frequency of less than 0.5% in a target cell, e.g., a human retinal cell, a human rod cell, a human cone cell, a human hair cell, or a human iPSC. In some embodiments, the prime editing methods disclosed herein have an editing efficiency of at least about 90% and an indel frequency of less than 0.1% in a target cell, e.g., a human retinal cell, a human rod cell, a human cone cell, a human hair cell, or a human iPSC.

[0453] In some embodiments, the prime editing methods disclosed herein have an editing efficiency of at least about 95% and an indel frequency of less than 1% in a target cell, e.g., a human retinal cell, a human rod cell, a human cone cell, a human hair cell, or a human iPSC. In some embodiments, the prime editing methods disclosed herein have an editing efficiency of at least about 95% and an indel frequency of less than 0.5% in a target cell, e.g., a human retinal cell, a human rod cell, a human cone cell, a human hair cell, or a human iPSC. In some embodiments, the prime editing methods disclosed herein have an editing efficiency of at least about 95% and an indel frequency of less than 0.1% in a target cell, e.g., a human retinal cell, a human rod cell, a human cone cell, a human hair cell, or a human iPSC. In some embodiments, any number of indels is determined after at least 1 hour, at least 2 hours, at least 6 hours, at least 12 hours, at least 24 hours, at least 36 hours, at least 48 hours, at least 3 days, at least 4 days, at least 5 days, at least 7 days, at least 10 days, or at least 14 days of exposing a target gene (e.g., a USH2A gene within the genome of a cell) to a prime editing composition. In some embodiments, the editing efficiency is determined after 1 hour, 2 hours, 6 hours, 12 hours, 24 hours, 36 hours, 48 hours, 3 days, 4 days, 5 days, 7 days, 10 days, or 14 days of exposing a target gene (e.g., a USH2A gene within the genome of a cell) to a prime editing composition. In some embodiments, the prime editing composition described herein result in less than 50%, less than 40%, less than 30%, less than 20%, less than 19%, less than 18%, less than 17%, less than 16%, less than 15%, less than 14%, less than 13%, less than 12%, less than 11%, less than 10%, less than 9%, less than 8%, less than 7%, less than 6%, less than 5%, less than 4%, less than 3%, less than 2%, less than 1%, less than 0.9%, less than 0.8%, less than 0.7%, less than 0.6%, less than 0.5%, less than 0.4%, less than 0.3%, less than 0.2%, less than 0.1%, less than 0.09%, less than 0.08%, less than 0.07%, less than 0.06%, less than 0.05%, less than 0.04%, less than 0.03%, less than 0.02%, or less than 0.01% off-target editing in a chromosome that includes the target gene. In some embodiments, off-target editing is determined after at least 1 hour, at least 2 hours, at least 6 hours, at least 12 hours, at least 24 hours, at least 36 hours, at least 48 hours, at least 3 days, at least 4 days, at least 5 days, at least 7 days, at least 10 days, or at least 14 days of exposing a target gene (e.g., a nucleic acid within the genome of a cell) to a prime editing composition. In some embodiments, the prime editing compositions (e.g., PEgRNAs and prime editors as described herein) and prime editing methods disclosed herein can be used to edit a target USH2A gene. In some embodiments, the target USH2A gene comprises a mutation compared to a wild type USH24 gene. In some embodiments, the mutation is associated with Usher syndrome type 2. In some embodiments, the target USH2A gene comprises an editing target sequence that contains the mutation associated with Usher syndrome type 2. In some embodiments, the mutation is associated with nsRP. In some embodiments, the target US2A gene comprises an editing target sequence that contains the mutation associated with nsRP. In some embodiments, the mutation is in a coding region of the target USH2A gene. In some embodiments, the mutation is in an exon of the target USH2A gene. In some embodiments, the prime editing method comprises contacting a target USH2A gene with a prime editing composition comprising a prime editor, a PEgRNA, and/or a ngRNA. In some embodiments, contacting the target USH2A gene with the prime editing composition results in incorporation of one or more intended nucleotide edits in the target USH42A gene. In some embodiments, the incorporation is in a region of the target USH2A gene that corresponds to an editing target sequence in the USH2A gene. In some embodiments, the one or more intended nucleotide edits comprises a single nucleotide substitution, an insertion, a deletion, or any combination thereof, compared to the endogenous sequence of the target USH2A gene. In some embodiments, incorporation of the one or more intended nucleotide edits results in replacement of one or more mutations with the corresponding sequence that encodes a wild type usherin polypeptide set forth in SEQ ID NO: 7598. In some embodiments, incorporation of the one or more intended nucleotide edits results in replacement of the one or more mutations with the corresponding sequence in a wild type USH2A gene. In some embodiments, incorporation of the one more intended nucleotide edits results in correction of a mutation in the target USH2A gene. In some embodiments, the target USH2A gene comprises an editing template sequence that contains the mutation. In some embodiments, contacting the target USH2A gene with the prime editing composition results in incorporation of one or more intended nucleotide edits in the target USH2A gene, which corrects the mutation in the editing target sequence (or a double stranded region comprising the editing target sequence and the complementary sequence to the editing target sequence on a target strand) in the target USH2A gene.

[0454] In some embodiments, incorporation of the one more intended nucleotide edits results in correction of a mutation in exon 1, exon 2, exon 3, exon 4, exon 5, exon 6, exon 7, exon 8, exon 9, exon 10, exon 11, exon 12, exon 13, exon 14, exon 15, exon 16, exon 17, exon 18, exon 19, exon 20, exon 21, exon 22, exon 23, exon 24, exon 25, exon 26, exon 27, exon 28, exon 29, exon 30, exon 31, exon 32, exon 33, exon 34, exon 35, exon 36, exon 37, exon 38, exon 39, exon 40, exon 41, exon 42, exon 43, exon 44, exon 45, exon 46, exon 47, exon 48, exon 49, exon 50, exon 51, exon 52, exon 53, exon 54, exon 55, exon 56, exon 57, exon 58, exon 59, exon 60, exon 61, exon 62, exon 63, exon 64, exon 65, exon 66, exon 67, exon 68, exon 69, exon 70, exon 71, or exon 72 of the USH2A gene as compared to a wild type USH2A gene. In some embodiments, incorporation of the one more intended nucleotide edits results in correction of a mutation in exon 1, exon 2, exon 3, exon 4, exon 5, exon 6, exon 7, exon 8, exon 9, exon 10, exon 11, exon 12, exon 13, exon 14, exon 15, exon 16, exon 17, exon 18, exon 19, exon 20, or exon 21 of the USH2A gene as compared to a wild type USH2A gene. In some embodiments, incorporation of the one more intended nucleotide edits results in correction of a mutation at a splice site (i.e. an intron/exon junction) of the USH2A gene as compared to a wild type USH2A gene. In some embodiments, incorporation of the one more intended nucleotide edits results in correction of a mutation in an intron of the USH2A gene as compared to a wild type USH2A gene.

[0455] In some embodiments, incorporation of the one or more intended nucleotide edits results in correction of an USH2A gene sequence and restores wild type expression and function of the wild type usherin protein. In some embodiments, incorporation of the one or more intended nucleotide edits results in correction of an USH2A gene sequence and restores wild type expression and function of the wild type usherin isoform b protein. In some embodiments, incorporation of the one or more intended nucleotide edits results in correction of an USH2A gene sequence and restores wild type expression and function of the wild type usherin isoform a protein. In some embodiments, incorporation of the one or more intended nucleotide edits does not correct the mutation in the editing target sequence to wild type sequence, but allows for expression of a functional usherin protein, e.g., a functional isoform b or a functional isoform a, of the usherin protein, encoded by the USH2A gene. For example, in some embodiments, incorporation of the one or more intended nucleotide edits results in one or more codons that are different from a wild type codon but encode one or more amino acids same as the wild type usherin protein. In some embodiments, incorporation of the one or more intended nucleotide edits results in one or more codons that encode one or more amino acids different from the wild type usherin protein, but allows for expression of a functional usherin protein.

[0456] In some embodiments, incorporation of the one or more intended nucleotide edits results in correction of a mutation that is in exon 13 of the USH2A gene as compared to a wild type USH2A1 gene. In some embodiments, incorporation of the one or more intended nucleotide edits results in correction of a mutation in the USH2A gene that is located between positions 216246995 and 216247195 of human chromosome 1. In some embodiments, incorporation of the one or more intended nucleotide edits results in correction of a E767 frameshift (E767fs) mutation in the usherin protein encoded by the USH2A gene as compared to a wild type usherin protein as set forth in SEQ ID N0:7598 and restores expression and function of a wild type usherin protein. In some embodiments, incorporation of the one or more intended nucleotide edits results in correction of a deletion of nucleotide G at a position corresponding to position 216247095 of human chromosome 1 (c.2299delG mutation) in the USH2A gene as compared to a wild type USH2A gene. In some embodiments, incorporation of the one or more intended nucleotide edits results in correction of a deletion of nucleotide C at a position corresponding to position 216247095 of human chromosome 1 as compared to a wild type USH2A gene. In some embodiments, the one or more nucleotide edits incorporated in the USH2A gene is an insertion of nucleotide G (or an insertion of nucleotide C in a complementary strand) at a position corresponding to position 216247095 of human chromosome 1 as compared to the endogenous sequence of the USH2A gene.

[0457] In some embodiments, incorporation of the one or more intended nucleotide edits results in correction of a mutation in the USH2A gene that is located between positions 216247018 and 216247218 of human genome 1. In some embodiments, incorporation of the one or more intended nucleotide edits results in correction of a mutation that results in a C759F amino acid substitution in the usherin protein encoded by the USH2A gene as compared to a wild type usherin protein as set forth in SEQ ID NO:7598 and restores expression and function of a wild type usherin protein. In some embodiments, incorporation of the one or more intended nucleotide edits results in correction of a G→T nucleotide substitution in the USH2A gene at a position corresponding to position 216247118 of human chromosome 1 (c.2276G→T mutation) as compared to a wild type USH2A gene. In some embodiments, incorporation of the one or more intended nucleotide edits results in correction of a C→A nucleotide substitution in the USH2A gene at a position corresponding to position 216247118 of human chromosome 1 as compared to a wild type USH2A gene. In some embodiments, the one or more nucleotide edits incorporated in the USH2A gene is a T→C nucleotide substitution (or a A→C nucleotide substitution in a complementary strand) at a position corresponding to position 216247118 of human chromosome 1 as compared to the endogenous sequence of the USH2A gene.

[0458] In some embodiments, incorporation of the one or more intended nucleotide edits results in correction of a mutation that is in intron 40 of the USH24 gene as compared to a wild type USH2A gene. In some embodiments, incorporation of the one or more intended nucleotide edits results in correction of a mutation that is located between positions 215891098 and 216247218 of human genome 1. In some embodiments, incorporation of the one or more intended nucleotide edits results in correction of a mutation that results in inclusion of a pseudo exon between exon 40 and exon 41 into a USH2A mRNA encoded by the USH2A gene as compared to a wild type USH2A mRNA, and restores expression of a wild type USH2A mRNA, and expression and function of a wild type usherin protein. In some embodiments, incorporation of the one or more intended nucleotide edits results in correction of a A→G nucleotide substitution in the USH2A gene at a position corresponding to position 215891198 of human chromosome 1 (c.7595-2144 A→G mutation) as compared to a wild type US1I2A gene. In some embodiments incorporation of the one or more intended nucleotide edits results in correction of a T→C nucleotide substitution in the USH2A gene at a position corresponding to position 215891198 of human chromosome 1 as compared to a wild type USH2A gene. In some embodiments, the one or more nucleotide edits incorporated in the USH2A gene is a G→A nucleotide substitution (or a C→T nucleotide substitution in a complementary strand) at a position corresponding to position 215891198 of human chromosome 1 as compared to the endogenous sequence of the USH2A gene.

[0459] In some embodiments, incorporation of the one or more intended nucleotide edits results in correction of a mutation that is in exon 61 of the USH2A gene as compared to a wild type USH2A gene. In some embodiments, incorporation of the one or more intended nucleotide edits results in correction of a mutation that is located between positions 215728132 and 215728332 as set forth in human genome 1. In some embodiments, incorporation of the one or more intended nucleotide edits results in correction of a mutation that results in an amino acid substitution W3955* in the usherin protein encoded by the USH2A gene as compared to a wild type usherin protein as set forth in SEQ ID NO:7598, wherein * refers to a premature stop codon, and wherein incorporation of the one or more intended nucleotide edits restores expression and function of a wild type usherin protein. In some embodiments, incorporation of the one or more intended nucleotide edits results in correction of a G→A nucleotide substitution in the USH2A gene at a position corresponding to position 216247118 of human chromosome 1 (c.11864G→A mutation) as compared to a wild type US112A gene. In some embodiments, incorporation of the one or more intended nucleotide edits results in correction of a C→T nucleotide substitution in the USH2A gene at a position corresponding to position 216247118 of human chromosome 1 as compared to a wild type USH2A gene. In some embodiments, the one or more nucleotide edits incorporated in the USH2A gene is a A→G nucleotide substitution in the USH2A gene (or a T→C nucleotide substitution in a complementary strand) at a position corresponding to position 216247118 of human chromosome 1 as compared to the endogenous sequence of the USH2A gene.

[0460] In some embodiments, the target USH2A gene is in a target cell. Accordingly, in one aspect provided herein is a method of editing a target cell comprising a target USH2A gene that encodes a polypeptide that comprises one or more mutations relative to a wild type USH2A gene. In some embodiments, the methods of the present disclosure comprise introducing a prime editing composition comprising a PEgRNA, a prime editor polypeptide, and/or a ngRNA into the target cell that has the target USH2A gene to edit the target USH2A gene, thereby generating an edited cell. In some embodiments, the target cell is a mammalian cell. In some embodiments, the target cell is a human cell. In some embodiments, the target cell is a primary cell. In some embodiments, the target cell is a human primary cell. In some embodiments, the target cell is a progenitor cell. In some embodiments, the target cell is a human progenitor cell. In some embodiments, the target cell is a stem cell. In some embodiments, the target cell is a human stem cell. In some embodiments, the cell is an induced pluripotent stem cell (iPSC). In some embodiments, the cell is a human induced pluripotent stem cell (hiPSC). In some embodiments, the cell is an embryonic stem cell (ESC). In some embodiments, the cell is a human embryonic stem cell. In some embodiments, the target cell is a retinal cell. In some embodiments, the target cell is a human retinal cell. In some embodiments, the target cell is a photoreceptor cell. In some embodiments, the target cell is a human photoreceptor cell. In some embodiments, the target cell is a rod cell. In some embodiments, the target cell is a human rod cell. In some embodiments, the target cell is a cone cell. In some embodiments, the target cell is a human cone cell. In some embodiments, the target cell is a retinal pigment epithelium cell. In some embodiments, the target cell is a human retinal pigment epithelium cell. In some embodiments, the target cell is a hair cell. In some embodiments, the target cell is a human hair cell. In some embodiments, the target cell is a human retinal cell derived from an induced human pluripotent stem cell (iPSC). In some embodiments, the cell is a neuron. In some embodiments, the cell is a neuron from basal ganglia. In some embodiments, the cell is a neuron from basal ganglia of a subject. In some embodiments, the cell is a neuron in the basal ganglia of a subject. In some embodiments, the cell edited by prime editing can be differentiated into, or give rise to recovery of a population of cells. In some embodiments, the target cell is an ex vivo cell. In some embodiments, the target cell is an ex vivo cell obtained from a human subject. In some embodiments, the target cell is in a subject, e.g., a human subject.

[0461] In some embodiments, components of a prime editing composition described herein are provided to a target cell in vitro. In some embodiments, components of a prime editing composition described herein are provided to a target cell ex vivo. In some embodiments, components of a prime editing composition described herein are provided to a target cell in vivo.

[0462] In some embodiments, incorporation of the one or more intended nucleotide edits in the target USH2A gene that comprises one or more mutations restores wild type expression and function of the usherin protein encoded by the USH2A gene. In some embodiments, the target USH2A gene comprises a frameshift mutation (c.2299delG mutation) in exon 13, which results in premature stop codon as compared to a wild type usherin protein prior to incorporation of the one or more intended nucleotide edits. In some embodiments, the target US1I2A gene encodes a C759F (resulted from c.2276G→T mutation) amino acid substitution as compared to a wild type usherin protein prior to incorporation of the one or more intended nucleotide edits. In some embodiments, incorporation of the one or more nucleotide edits restores expression and/or function of a wild type usherin protein at least partially or completely. In some embodiments, incorporation of the one or more nucleotide edits restores expression and/or function of a wild type usherin protein isoform a at least partially or completely. In some embodiments, incorporation of the one or more nucleotide edits restores expression and/or function of a wild type usherin protein isoform b at least partially or completely. In some embodiments, expression and/or function of the usherin protein may be measured when expressed in a target cell. In some embodiments, incorporation of the one or more intended nucleotide edits in the target USH2A gene comprising one or more mutations lead to a fold change in a level of USH2A gene expression, usherin protein expression, or a combination thereof. In some embodiments, a change in the level of usherin isoform a expression level can comprise a fold change of, e.g., 2-fold. 3-fold. 4-fold, 5-fold, 6-fold, 7-fold, 8-fold, 9-fold, 10-fold, 15-fold, 20-fold, 25-fold, 30-fold. 40-fold, 50-fold, 60-fold, 70-fold, 80-fold, 90-fold, 100-fold or greater as compared to expression in a suitable control cell not introduced with a prime editing composition described herein. In some embodiments, a change in the level of usherin isoform b expression level can comprise a fold change of, e.g., 2-fold, 3-fod, 4-fold, 5-fold, 6-fold, 7-fold, 8-fold, 9-fold, 10-fold, 15-fold, 20-fold, 25-fold, 30-fold, 40-fold, 50-fold. 60-fold, 70-fold. 80-fold, 90-fold, 100-fold or greater as compared to expression in a suitable control cell not introduced with a prime editing composition described herein. In some embodiments, incorporation of the one or more intended nucleotide edits in the target USH2A gene that comprises one or more mutations restores wild type expression of the usherin protein by at least 10%, 20%, 30%, 40%, 50%, 60%, 70%, 80%, 90%, 95%, or 99% or more as compared to wild type expression of the usherin protein in a suitable control cell that comprises a wild type US112A gene.

[0463] In some embodiments, incorporation of the one or more intended nucleotide edits in the target USH2A gene that comprises one or more mutations or nucleotide alterations results in expression of a usherin polypeptide encoded by the target USH2A gene. In some embodiments, incorporation of the one or more intended nucleotide edits in the target USH2A gene that comprises one or more mutations or nucleotide alterations results in an edited USH2A gene that has a wild type USH2A gene sequence. In some embodiments, incorporation of the one or more intended nucleotide edits in the target USH2A that comprises one or more mutations or nucleotide alterations results in expression of a functional usherin polypeptide. In some embodiments, incorporation of the one or more intended nucleotide edits in the target USH2A gene that comprises one or more mutations or nucleotide alterations results in expression of a functional usherin polypeptide that has the same sequence as a wild type usherin polypeptide. In some embodiments, expression and/or function of the usherin polypeptide may be measured when expressed in a target cell. In some embodiments, incorporation of the one or more intended nucleotide edits in the target USH2A gene leads to a fold change in a level of USH2A transcript expression, usherin protein expression, or a combination thereof. In some embodiments, a change in the level of USH2A transcript expression level can comprise a fold change of, e.g., 2-fold, 3-fold, 4-fold, 5-fold, 6-fold, 7-fold, 8-fold, 9-fold, 10-fold, 15-fold, 20-fold, 25-fold, 30-fold, 40-fold, 50-fold, 60-fold, 70-fold, 80-fold, 90-fold, 100-fold or greater as compared to expression in a suitable control cell not introduced with a prime editing composition described herein. In some embodiments, incorporation of the one or more intended nucleotide edits in the target USH2 A gene that comprises one or more mutations restores wild type expression of the usherin protein isoform a by at least 10%, 20%, 30%, 40%, 50%, 60%, 70%, 80%, 90%, 95%, o99% or more as compared to wild type expression of the usherin protein isoform a in a suitable control cell that comprises a wild type USH2A gene. In some embodiments, incorporation of the one or more intended nucleotide edits in the target USH2A gene that comprises one or more mutations restores wild type expression of the usherin protein isoform b by at least 10%, 20%, 30%, 40%, 50%, 60%, 70%, 80%, 90%, 95%, o99% or more as compared to wild type expression of the usherin protein isoform b in a suitable control cell that comprises a wild type USH2A gene.

[0464] In some embodiments, an usherin protein or USH2A gene expression increase can be measured by a functional assay. In some embodiments, protein expression can be measured using a protein assay. In some embodiments, protein expression can be measured using antibody testing. In some embodiments, an antibody can comprise anti-usherin antibody. In some embodiments, protein expression can be measured using ELISA, mass spectrometry, Western blot, sodium dodecyl sulfate poly acrylamide gel electrophoresis (SDS-PAGE), high performance liquid chromatography (HPLC), electrophoresis, or any combination thereof. In some embodiments, a protein assay can comprise SDS-PAGE and densitometric analysis of a Coomassie Blue-stained gel. Expression and function of usherin protein can be examined ex vivo or in vivo. In some embodiments, usherin protein expression in target cells or target organs, e.g., photoreceptors, or particular regions such as periciliary region of photoreceptors, can be examined by, e.g., immunofluorescent assay using an antibody that specifically recognizes usherin, in some embodiments, expression and activity can be measured by examining expression and co-localization of proteins involved in the function of usherin protein net work, for example, whirlin. In some embodiments, activity of the unsherin protein can be examined in vivo by measuring restoration of retinal function, for example, by visual motor response (VNMR) assay.

Methods of Treating Usher Syndrome and nsRP

[0465] In some embodiments, provided herein are methods for treatment of a subject diagnosed with a disease associated with or caused by one or more pathogenic mutations. In some embodiments, provided herein are methods for treatment of a subject diagnosed with a disease associated with or caused by one or more pathogenic mutations that can be corrected by prime editing. In some embodiments, methods of treatment provided herein comprises editing one or more genes other than the gene that harbors the one or more pathogenic mutations. In some embodiments, provided herein are methods for treating Usher syndrome type 2 that comprise administering to a subject a therapeutically effective amount of a prime editing composition, or a pharmaceutical composition comprising a prime editing composition as described herein. In some embodiments, provided herein are methods for treating non-syndromic retinitis pigmentosa (nsRP) that comprise administering to a subject a therapeutically effective amount of a prime editing composition, or a pharmaceutical composition comprising a prime editing composition as described herein. In some embodiments, administration of the prime editing composition results in incorporation of one or more intended nucleotide edits in the target gene in the subject. In some embodiments, administration of the prime editing composition results in correction of one or more pathogenic mutations, e.g., point mutations, insertions, or deletions, associated with Usher syndrome type 2 in the subject. In some embodiments, administration of the prime editing composition results in correction of one or more pathogenic mutations, e.g., point mutations, insertions, or deletions, associated with nsRP in the subject. In some embodiments, the target gene comprise an editing target sequence that contains the pathogenic mutation. In some embodiments, administration of the prime editing composition results in incorporation of one or more intended nucleotide edits in the target gene that corrects the pathogenic mutation in the editing target sequence (or a double stranded region comprising the editing target sequence and the complementary sequence to the editing target sequence on a target strand) of the target gene in the subject.

[0466] In some embodiments, the method provided herein comprises administering to a subject an effective amount of a prime editing composition, for example, a PEgRNA, a prime editor, and/or a ngRNA. In some embodiments, the method comprises administering to the subject an effective amount of a prime editing composition described herein, for example, polynucleotides, vectors, or constructs that encode prime editing composition components, or RNPs, LNPs, and/or polypeptides comprising prime editing composition components. Prime editing compositions can be administered to target the USH2A gene in a subject, e.g., a human subject, suffering from, having, susceptible to, or at risk for Usher syndrome type 2 or nsRP. Identifying a subject in need of such treatment can be in the judgment of a subject or a health care professional and can be subjective (e.g., opinion) or objective (e.g., measurable by a test or diagnostic method). In some embodiments, the subject has Usher syndrome type 2. In some embodiments, the subject has nsRP.

[0467] In some embodiments, the subject has been diagnosed with Usher syndrome type 2 or nsRP by sequencing of a USH2A gene in the subject. In some embodiments, the subject comprises at least a copy of USH2A gene that comprises one or more mutations compared to a wild type USH2A gene. In some embodiments, the subject comprises at least a copy of USH2A gene that comprises a mutation in a coding region of the USH2A gene as compared to a wild type USH2A gene. In some embodiments, the subject comprises at least a copy of USH2A gene that comprises a mutation in a non-coding region as compared to a wild type USH2A gene. In some embodiments, the subject comprises two copies of USH2A gene each comprising a mutation in a coding region of the USH12A gene as compared to a wild type US-12A gene. In some embodiments, the subject comprises two copies of USH2A gene each comprising a mutation in a non-coding region of the USH2A gene as compared to a wild type USH2A gene.

[0468] In some embodiments, the subject comprises at least a copy of USH2A gene that comprises a mutation as compared to a wild type USH2A gene wherein the mutation is associated with Usher syndrome type 2. In some embodiments, the subject comprises two copies of USH2A gene each comprising a mutation as compared to a wild type USH2A gene wherein the mutation is associated with Usher syndrome type 2. In some embodiments, the mutation is a c.2299delG mutation that results in a E767 frameshift mutation and a premature stop codon in the usherin protein encoded by the USH2A gene. In some embodiments, the subject comprises at least a copy of USH2A gene that comprises a mutation as compared to a wild type USH2A gene wherein the mutation is associated with nsRP. In some embodiments, the subject comprises two copies of USH2A gene each comprising a mutation as compared to a wild type USH2A gene wherein the mutation is associated with nsRP. In some embodiments, the mutation is a c.2276 mutation that results in a E767 frameshift mutation and a premature stop codon in the usherin protein encoded by the USH2A gene. In some embodiments, administrating to the subject an effective amount of a prime editing composition described herein corrects the mutation in the at least one copy of USH2A gene in the subject. In some embodiments, administrating to the subject an effective amount of a prime editing composition described herein corrects the mutation in both copies of US-12A gene in the subject. In some embodiments, administrating to the subject an effective amount of a prime editing composition described herein restores expression and function of a functional usherin protein in the subject. In some embodiments, administrating to the subject an effective amount of a prime editing composition described herein restores expression and/or function of a wild type usherin protein in the subject.

[0469] In some embodiments, the subject comprises at least a copy of USH2A gene that comprises a mutation in exon 1, exon 2, exon 3, exon 4, exon 5, exon 6, exon 7, exon 8, exon 9, exon 10, exon 11, exon 12, exon 13, exon 14, exon 15, exon 16, exon 17, exon 18, exon 19, exon 20, exon 21, exon 22, exon 23, exon 24, exon 25, exon 26, exon 27, exon 28, exon 29, exon 30, exon 31, exon 32, exon 33, exon 34, exon 35, exon 36, exon 37, exon 38, exon 39, exon 40, exon 41, exon 42, exon 43, exon 44, exon 45, exon 46, exon 47, exon 48, exon 49, exon 50, exon 51, exon 52, exon 53, exon 54, exon 55, exon 56, exon 57, exon 58, exon 59, exon 60, exon 61, exon 62, exon 63, exon 64, exon 65, exon 66, exon 67, exon 68, exon 69, exon 70, exon 71, or exon 72 as compared to a wild type USH2A gene. In some embodiments, the subject comprises at least a copy of USH2A gene that comprises a mutation in exon 1, exon 2, exon 3, exon 4, exon 5, exon 6, exon 7, exon 8, exon 9, exon 10, exon 11, exon 12, exon 13, exon 14, exon 15, exon 16, exon 17, exon 18, exon 19, exon 20, or exon 21 as compared to a wild type US112A gene. In some embodiments, the subject comprises two copies of USH12A gene each comprising a mutation in exon 1, exon 2, exon 3, exon 4, exon 5, exon 6, exon 7, exon 8, exon 9, exon 10, exon 11, exon 12, exon 13, exon 14, exon 15, exon 16, exon 17, exon 18, exon 19, exon 20, exon 21, exon 22, exon 23, exon 24, exon 25, exon 26, exon 27, exon 28, exon 29, exon 30, exon 31, exon 32, exon 33, exon 34, exon 35, exon 36, exon 37, exon 38, exon 39, exon 40, exon 41, exon 42, exon 43, exon 44, exon 45, exon 46, exon 47, exon 48, exon 49, exon 50, exon 51, exon 52, exon 53, exon 54, exon 55, exon 56, exon 57, exon 58, exon 59, exon 60, exon 61, exon 62, exon 63, exon 64, exon 65, exon 66, exon 67, exon 68, exon 69, exon 70, exon 71, or exon 72 as compared to a wild type USH2A gene. In some embodiments, the subject comprises two copies of USH2A gene each comprising a mutation in exon 1, exon 2, exon 3, exon 4, exon 5, exon 6, exon 7, exon 8, exon 9, exon 10, exon 11, exon 12, exon 13, exon 14, exon 15, exon 16, exon 17, exon 18, exon 19, exon 20, or exon 21 as compared to a wild type UST-42A gene. In some embodiments, the subject comprises at least a copy of USH2A gene that comprises a mutation at a splice site (i.e. an intron/exon junction) as compared to a wild type USH2A gene. In some embodiments, the subject comprises two copies of USH2A gene each comprising a mutation a mutation at a splice site (i.e. an intron/exon junction) as compared to a wild type USH2A gene. In some embodiments, the subject comprises at least a copy of USH2A gene that comprises a mutation in an intron as compared to a wild type USH2A gene. In some embodiments, the subject comprises two copies of USH2A gene each comprising a mutation in an intron as compared to a wild type USH2A gene. In some embodiments, the subject comprises two copies of USH2A gene, wherein each of the two copies comprises a same mutation, e.g., nucleotide deletion, insertion, substitution, or any mutation described herein or known in the art, wherein the mutation is associated with Usher syndrome type 2 or nsRP. In some embodiments, the subject comprises two copies of USH2A gene, wherein the two copies each comprises a different mutation, e.g., nucleotide deletion, insertion, substitution, or any mutation described herein or known in the art, wherein the mutation is associated with Usher syndrome type 2 or nsRP. In some embodiments, administrating to the subject an effective amount of a prime editing composition described herein corrects the mutation in at least one of the two copies of USH2A gene in the subject. In some embodiments, administrating to the subject an effective amount of a prime editing composition described herein corrects the mutation(s) in both copies of USH2A gene in the subject. In some embodiments, administrating to the subject an effective amount of a prime editing composition described herein restores expression and function of a functional usherin protein in the subject. In some embodiments, administrating to the subject an effective amount of a prime editing composition described herein restores expression and/or function of a wild type usherin protein in the subject. In some embodiments, the prime editing composition comprises a single PEgRNA. In some embodiments, the prime editing composition comprises two or more PEgR NAs each capable of correcting a different mutation in the USH2A gene.

[0470] In some embodiments, the subject comprises at least a copy of USH2A gene that comprises a mutation in exon 13 as compared to a wild type USH2A gene. In some embodiments, the subject comprises at least a copy of USH2A gene that comprises a mutation located between positions 216246995 and 216247195 of human chromosome 1 as compared to a wild type USH2A gene. In some embodiments, the subject comprises at least a copy of US112A gene that comprises a mutation that results in a E767 frameshift (E767fs) mutation in the usherin protein encoded by the USH2A gene as compared to a wild type usherin protein as set forth in SEQ ID NO:7598. In some embodiments, the subject comprises at least a copy of USH2A gene that comprises a deletion of nucleotide G at a position corresponding to position 216247095 of human chromosome 1 (c.2299de1G mutation) as compared to a wild type US112A gene. In some embodiments, the subject comprises two copies of USH2A gene each comprising a mutation in exon 13 as compared to a wild type USH2A gene. In some embodiments, the subject comprises two copies of USH12A gene each comprising a mutation located between positions 216246995 and 216247195 of human chromosome 1 as compared to a wild type USH2A gene. In some embodiments, the subject comprises two copies of USH2A gene each comprising a mutation that results in a E767 frameshift (E767fs) mutation in the usherin protein encoded by the USH2A gene as compared to a wild type usherin protein as set forth in SEQ ID N0:7598. In some embodiments, the subject comprises two copies of USH2A gene each comprising a deletion of nucleotide G at a position corresponding to position 216247095 of human chromosome 1 (c.2299de1G mutation) as compared to a wild type USH2A gene. In some embodiments, administrating to the subject an effective amount of a prime editing composition described herein corrects the mutation in at least one of the two copies of USH2A gene in the subject. In some embodiments, administrating to the subject an effective amount of a prime editing composition described herein corrects the mutation(s) in both copies of USH2A gene in the subject. In some embodiments, administrating to the subject an effective amount of a prime editing composition described herein restores expression and/or function of a wild type usherin protein in the subject.

[0471] In some embodiments, the subject comprises at least a copy of USH2A gene that comprises a mutation located between positions 216247018 and 216247218 of human chromosome 1 as compared to a wild type USH2A gene. In some embodiments, the subject comprises at least a copy of USH2A gene that comprises a mutation that results in a C759F amino acid substitution in the usherin protein encoded by the USH2A gene as compared to a wild type usherin protein as set forth in SEQ ID NO:7598. In some embodiments, the subject comprises at least a copy of USH2A gene that comprises a G→T nucleotide substitution at a position corresponding to position 216247118 of human chromosome 1 (c.2276G→T mutation) as compared to a wild type USH2A gene. In some embodiments, the subject comprises two copies of USH2A gene each comprising a mutation located between positions 216247018 and 216247218 of human chromosome 1 as compared to a wild type USH2A gene. In some embodiments, the subject comprises two copies of USH2A gene each comprising a mutation that results in a C759F amino acid substitution in the usherin protein encoded by the USH2A gene as compared to a wild type usherin protein as set forth in SEQ ID NO:7598. In some embodiments, the subject comprises two copies of USH2A gene each comprising a G→T nucleotide substitution at a position corresponding to position 216247118 of human chromosome 1 (c.2276G→T mutation) as compared to a wild type USH12A gene. In some embodiments, administrating to the subject an effective amount of a prime editing composition described herein corrects the mutation in at least one of the two copies of USH2A gene in the subject. In some embodiments, administrating to the subject an effective amount of a prime editing composition described herein corrects the mutation(s) in both copies of USH2A gene in the subject. In some embodiments, administrating to the subject an effective amount of a prime editing composition described herein restores expression and/or function of a wild type usherin protein in the subject.

[0472] In some embodiments, the subject comprises at least a copy of USH2A gene that comprises a mutation in intron 40 as compared to a wild type USH2A gene. In some embodiments, the subject comprises at least a copy of USH2A gene that comprises a mutation located between positions 215891098 and 215891298 of human chromosome 1 as compared to a wild type USH2A gene. In some embodiments, the subject comprises at least a copy of US112A gene that comprises a mutation that results in inclusion of a pseudo exon between exon 40 and exon 41 into a USH2A mRNA encoded by the USH2A gene as compared to a wild type USH2A mRNA. In some embodiments, the subject comprises at least a copy of USH2A gene that comprises a A→G nucleotide substitution at a position corresponding to position 215891198 of human chromosome 1 (c.7595-2144 A→G mutation) as compared to a wild type USH2-gene. In some embodiments, the subject comprises two copies of USH2A gene each comprising a mutation in intron 40 as compared to a wild type USH2A gene. In some embodiments, the subject comprises two copies of USH2A gene each comprising a mutation located between positions 215891098 and 215891298 of human chromosome 1 as compared to a wild type USH2A gene. In some embodiments, the subject comprises two copies of USH2A gene each comprising a mutation that results in inclusion of a pseudo exon between exon 40 and exon 41 into a USH2A mRNA encoded by the USH2A gene as compared to a wild type USH2A mRNA. In some embodiments, the subject comprises two copies of USH2A gene each comprising a A→G nucleotide substitution at a position corresponding to position 215891198 of human chromosome 1 (c.7595-2144 A→G mutation) as compared to a wild type USH2A gene. In some embodiments, administrating to the subject an effective amount of a prime editing composition described herein corrects the mutation in at least one of the two copies of USH2A gene in the subject. In some embodiments, administrating to the subject an effective amount of a prime editing composition described herein corrects the mutation(s) in both copies of USH2A gene in the subject. III some embodiments, administrating to the subject an effective amount of a prime editing composition described herein restores expression and/or function of a wild type usherin protein in the subject.

[0473] In some embodiments, the subject comprises at least a copy of USH2A gene that comprises a mutation in exon 61 of the USH2A gene as compared to a wild type USH2A gene. In some embodiments, the subject comprises at least a copy of USH2A gene that comprises a mutation located between positions 215728132 and 215728332 of human chromosome 1 as compared to a wild type USH2A gene. In some embodiments, the subject comprises at least a copy of US-12A gene that comprises a mutation that results in an amino acid substitution W3955* in the usherin protein encoded by the USH2A gene as compared to a wild type usherin protein as set forth in SEQ ID NO:7598, wherein * refers to a premature stop codon. In some embodiments, the subject comprises at least a copy of USH2A gene that comprises a G→A nucleotide substitution at a position corresponding to position 215728232 of human chromosome 1 (c.11864G→A mutation) as compared to a wild type USH2A gene.

[0474] In some embodiments, the subject comprises two copies of USH2A gene each comprising a mutation in exon 61 of the USH2A gene as compared to a wild type USH2A gene. In some embodiments, the subject comprises two copies of USH2A gene each comprising a mutation located between positions 215728132 and 215728332 of human chromosome 1 as compared to a wild type USH2A gene. In some embodiments, the subject comprises two copies of USH2A gene each comprising a mutation that results in an amino acid substitution W3955* in the usherin protein encoded by the USH2A gene as compared to a wild type usherin protein as set forth in SEQ ID NO:7598, wherein * refers to a premature stop codon. In some embodiments, the subject comprises two copies of USH2A gene each comprising a G→A nucleotide substitution at a position corresponding to position 215728232 of human chromosome 1 (c.11864G→A mutation) as compared to a wild type USH2A gene.

[0475] In some embodiments, administrating to the subject an effective amount of a prime editing composition described herein corrects the mutation in at least one of the two copies of USH2A gene in the subject. In some embodiments, administrating to the subject an effective amount of a prime editing composition described herein corrects the mutation(s) in both copies of USH2A gene in the subject. In some embodiments, administrating to the subject an effective amount of a prime editing composition described herein restores expression and/or function of a wild type usherin protein in the subject.

[0476] In some embodiments, a population of patients each having one or more mutations in the target gene (e.g., an USH2A gene) may be treated with a prime editing composition (e.g., a PEgRNA, a prime editor, and optionally an ngRNA as described herein) disclosed herein. In some embodiments, a population of patients with different mutations in the target gene can be treated with the same prime editing composition comprising a single PEgRNA, a prime editor, and optionally an ngRNA. In some embodiments, a single prime editing composition comprising a single PEgRNA and a prime editor can be used to correct one or more, or two or more, mutations in the target gene in a populations of patients, wherein one or more patients in the population have different mutations from one another. In some embodiments, the prime editing composition comprising a single pair of PEgRNA, a prime editor, and optionally an ngRNA can be used to correct 2, 3, 4, 5, 6, 7, 8, 9, 10, 15, 20, 25 or more mutations in the target gene in a population of patients, wherein one or more patients in the population have different mutations from one another. In some embodiments, the PEgRNA comprises an editing template comprising a wild type sequence of the gene.

[0477] In some embodiments, a patient with multiple mutations in the target USH2A gene can be treated with a prime editing composition (e.g., a PEgRNAs, a prime editor, and optionally an ngRNA as described herein). For example, in some embodiments, a subject may comprise two copies of the gene, each comprising one or more different mutations. In some embodiments, a patient with one or more different mutations in the target gene can be treated with a single prime editing composition comprising a PEgRNAs, a prime editor, and optionally an ngRNA.

[0478] In some embodiments, the method comprises directly administering prime editing compositions provided herein to a subject. The prime editing compositions described herein can be delivered with in any form as described herein, e.g., as LNPs, RNPs, polynucleotide vectors such as viral vectors, or mRNAs. The prime editing compositions can be formulated with any pharmaceutically acceptable carrier described herein or known in the art for administering directly to a subject. Components of a prime editing composition or a pharmaceutical composition thereof may be administered to the subject simultaneously or sequentially. For example, in some embodiments, the method comprises administering a prime editing composition, or pharmaceutical composition thereof, comprising a complex that comprises a prime editor fusion protein and a PEgRNA and/or a ngRNA, to a subject. In some embodiments, the method comprises administering a polynucleotide or vector encoding a prime editor to a subject simultaneously with a PEgRNA and/or a ngRNA. In some embodiments, the method comprises administering a polynucleotide or vector encoding a prime editor to a subject before administration with a PEgRNA and/or a ngRNA.

[0479] Suitable routes of administrating the prime editing compositions to a subject include, without limitation: topical, subcutaneous, transdermal, intradermal, intralesional, intraarticular, intraperitoneal, intravesical, transmucosal, gingival, intradental, intracochlear, transtympanic, intraorgan, epidural, intrathecal, intramuscular, intravenous, intravascular, intraosseus, periocular, intratumoral, intracerebral, and intracerebroventricular administration. In some embodiments, the compositions described are administered intraperitoneally, intravenously, or by direct injection or direct infusion. In some embodiments, the compositions described are administered by direct injection or infusion into a subject. In some embodiments, the compositions described herein are administered by direct injection. In some embodiments, the compositions described herein are administered by subretinal injection. In some embodiments, the compositions described herein are administered by injection to the fovea or parafoveal regions. In some embodiments, the compositions described herein are administered by injection to peripheral regions of the retina. In some embodiments, the compositions described herein are administered by injection through the round window. In some embodiments, the compositions described herein are administered to the retina. In some embodiments, the compositions described herein are administered to the inner ear. In some embodiments, the compositions described herein are administered by injection to the cochlear duct. In some embodiments, the compositions described herein are administered by injection to the perilymph-filled spaces surrounding the cochlear duct, scala tympani and scala vestibuli, through the oval or round window membrane. In some embodiments, the compositions described herein are administered to a subject by injection, by means of a catheter, by means of a suppository, or by means of an implant.

[0480] In some embodiments, the method comprises administering cells edited with a prime editing composition described herein to a subject. In some embodiments, the cells are allogeneic. In some embodiments, allogeneic cells are or have been contacted ex vivo with a prime editing composition or pharmaceutical composition thereof and are introduced into a human subject in need thereof. In some embodiments, the cells are autologous to the subject. In some embodiments, cells are removed from a subject and contacted ex vivo with a prime editing composition or pharmaceutical composition thereof and are re-introduced into the subject.

[0481] In some embodiments, cells are contacted ex vivo with one or more components of a prime editing composition. In some embodiments, the ex vivo-contacted cells are introduced into the subject, and the subject is administered in vivo with one or more components of a prime editing composition. For example, in some embodiments, cells are contacted ex vivo with a prime editor and introduced into a subject. In some embodiments, the subject is then administered with a PEgRNA and/or a ngRNA, or a polynucleotide encoding the PEgRNA and/or the ngRNA.

[0482] In some embodiments, cells contacted with the prime editing composition are determined for incorporation of the one or more intended nucleotide edits in the genome before re-introduction into the subject. In some embodiments, the cells are enriched for incorporation of the one or more intended nucleotide edits in the genome before re-introduction into the subject. In some embodiments, the edited cells are primary cells. In some embodiments, the edited cells are progenitor cells. In some embodiments, the edited cells are stem cells. In some embodiments, the edited cells are progenitor cell. In some embodiments, the edited cells are induced pluripotent stem cells. In some embodiments, the edited cells are hepatocytes. In some embodiments, the edited cells are primary human cells. In some embodiments, the edited cells are human progenitor cells. In some embodiments, the edited cells are human stem cells. In some embodiments, the edited cells are human hepatocytes. In some embodiments, the cell is a neuron. In some embodiments, the cell is a neuron from basal ganglia. In some embodiments, the cell is a neuron from basal ganglia of a subject. In some embodiments, the cell is a neuron in the basal ganglia of a subject. In some embodiments, the edited cells are an ex vivo cells. In some embodiments, the edited cells are an ex vivo cells obtained from a human subject. In some embodiments, the edited cells are in a subject, e.g., a human subject. The prime editing composition or components thereof may be introduced into a cell by any delivery approaches as described herein, including LNP administration, RNP administration, electroporation, nucleofection, transfection, viral transduction, microinjection, cell membrane disruption and diffusion, or any other approach known in the art.

[0483] The cells edited with prime editing can be introduced into the subject by any route known in the art. In some embodiments, the edited cells are administered to a subject by direct infusion. In some embodiments, the edited cells are administered to a subject by intravenous infusion. In some embodiments, the edited cells are administered to a subject as implants.

[0484] The pharmaceutical compositions, prime editing compositions, and cells, as described herein, can be administered in effective amounts. In some embodiments, the effective amount depends upon the mode of administration. In some embodiments, the effective amount depends upon the stage of the condition, the age and physical condition of the subject, the nature of concurrent therapy, if any, and like factors well-known to the medical practitioner.

[0485] The specific dose administered can be a uniform dose for each subject. Alternatively, a subject's dose can be tailored to the approximate body weight of the subject. Other factors in determining the appropriate dosage can include the disease or condition to be treated or prevented, the severity of the disease, the route of administration, and the age, sex and medical condition of the patient.

[0486] In embodiments wherein components of a prime editing composition are administered sequentially, the time between sequential administration can be at least 1 hour, at least 2 hours, at least 6 hours, at least 12 hours, at least 24 hours, at least 36 hours, at least 48 hours, at least 3 days, at least 4 days, at least 5 days, at least 7 days, at least 10 days, or at least 14 days.

[0487] In some embodiments, a method of monitoring treatment progress is provided. In some embodiments, the method includes the step of determining a level of diagnostic marker, for example, correction of a mutation in USH2A gene, or diagnostic measurement associated with Usher syndrome type 2 or nsRP in a subject suffering from the disease symptoms and has been administered an effective amount of a prime editing composition described herein. The level of the diagnostic marker determined in the method can be compared to known levels of the marker in either healthy normal controls or in other afflicted subjects to establish the subject's disease status.

### Delivery

[0488] Prime editing compositions described herein can be delivered to a cellular environment with any approach known in the art. Components of a prime editing composition can be delivered to a cell by the same mode or different modes. For example, in some embodiments, a prime editor can be delivered as a polypeptide or a polynucleotide (DNA or RNA) encoding the polypeptide. In some embodiments, a PEgRNA can be delivered directly as an RNA or as a DNA encoding the PEgRNA.

[0489] In some embodiments, a prime editing composition component is encoded by a polynucleotide, a vector, or a construct. In some embodiments, a prime editor polypeptide, a PEgRNA and/or a ngRNA is encoded by a polynucleotide. In some embodiments, the polynucleotide encodes a prime editor fusion protein comprising a DNA binding domain and a DNA polymerase domain. In some embodiments, the polynucleotide encodes a DNA polymerase domain of a prime editor. In some embodiments, the polynucleotide encodes a DNA polymerase domain of a prime editor. In some embodiments, the polynucleotide encodes a portion of a prime editor protein, for example, a N-terminal portion of a prime editor fusion protein connected to an intein-N. In some embodiments, the polynucleotide encodes a portion of a prime editor protein, for example, a C-terminal portion of a prime editor fusion protein connected to an intein-C. In some embodiments, the polynucleotide encodes a PEgRNA and/or a ngRNA. In sonic embodiments, the polypeptide encodes two or more components of a prime editing composition, for example, a prime editor fusion protein and a PEgRNA.

[0490] In some embodiments, the polynucleotide encoding one or more prime editing composition components is delivered to a target cell is integrated into the genome of the cell for long-term expression, for example, by a retroviral vector. In some embodiments, the polynucleotide delivered to a target cell is expressed transiently. For example, the polynucleotide may be delivered in the form of a mRNA, or a non-integrating vector (non-integrating virus, plasmids, minicircle DNAs) for episomal expression.

[0491] In some embodiments, a polynucleotide encoding one or more prime editing system components can be operably linked to a regulatory element, e.g., a transcriptional control element, such as a promoter. In some embodiments, the polynucleotide is operably linked to multiple control elements. Depending on the expression system utilized, any of a number of suitable transcription and translation control elements, including constitutive and inducible promoters, transcription enhancer elements, transcription terminators, etc. may be used in the expression vector (e.g., U6 promoter, H1 promoter).

[0492] In some embodiments, the polynucleotide encoding one or more prime editing composition components is a part of, or is encoded by, a vector. In some embodiments, the vector is a viral vector. In some embodiments, the vector is a non-viral vector.

[0493] Non-viral vector delivery systems can include DNA plasmids, RNA (e.g., a transcript of a vector described herein), naked nucleic acid, and nucleic acid complexed with a delivery vehicle, such as a liposome. In some embodiments, the polynucleotide is provided as an RNA. e.g., a mRNA or a transcript. Any RNA of the prime editing systems, for example a guide RNA or a base editor-encoding mRNA, can be delivered in the form of RNA. In some embodiments, one or more components of the prime editing system that are RNAs is produced by direct chemical synthesis or may be transcribed in vitro from a DNA. In some embodiments, a mRNA that encodes a prime editor polypeptide is generated using in vitro transcription. Guide polynucleotides (e.g., PEgRNA or ngRNA) can also be transcribed using in vitro transcription from a cassette containing a T7 promoter, followed by the sequence “CC”, and guide poly nucleotide sequence. In some embodiments, the prime editor encoding nRNA, PEgRNA, and/or ngRNA are synthesized in vitro using an RNA polymerase enzyme (e.g., T7 polymerase, T3 polymerase, SP6 polymerase, etc.). Once synthesized, the RNA can directly contact a target USH2A gene or can be introduced into a cell using any suitable technique for introducing nucleic acids into cells (e.g., microinjection, electroporation, transfection). In some embodiments, the prime editor-coding sequences, the PEgRNAs, and/or the ngRNAs are modified to include one or more modified nucleoside e.g., using pseudo-U or 5-Methyl-C.

[0494] Methods of non-viral delivery of nucleic acids can include lipofection, electroporation, nucleofection, microinjection, biolistics, virosomes, liposomes, immunoliposomes, polycation or lipid:nucleic acid conjugates, nanoparticles, cell penetrating peptides and associated conjugated molecules and chemistry, naked DNA, artificial virions, cell membrane disruption by a microfluidics device, and agent-enhanced uptake of DNA. Cationic and neutral lipids that are suitable for efficient receptor-recognition lipofection of polynucleotides can be used. Delivery can be to cells (e.g., in vitro or ex vivo administration) or target tissues (e.g., in vivo administration). The preparation of lipid:nucleic acid complexes, including targeted liposomes such as immunolipid complexes, can be used.

[0495] Viral vector delivery systems can include DNA and RNA viruses, which can have either episomal or integrated genomes after delivery to the cell. RNA or DNA viral based systems can be used to target specific cells and trafficking the viral payload to an organelle of the cell. Viral vectors can be administered directly (in vivo) or they can be used to treat cells in vitro, and the modified cells can optionally be administered after delivery (ex vivo).

[0496] In some embodiments, the viral vector is a retroviral, lentiviral, adenoviral, adeno-associated viral or herpes simplex viral vector. Retroviral vectors can include those based upon murine leukemia virus (MuLV), gibbon ape leukemia virus (GaLV), simian immunodeficiency virus (SIV), human immunodeficiency virus (HIV), and combinations thereof. In some embodiments, the retroviral vector is a lentiviral vector. In some embodiments, the retroviral vector is a gamma retroviral vector. In some embodiments, the viral vector is an adenoviral vector. In some embodiments, the viral vector is an adeno-associated virus (“AAV”) vector.

[0497] In some embodiments, polynucleotides encoding one or more prime editing composition components are packaged in a virus particle. Packaging cells can be used to form virus particles that can infect a target cell. Such cells can include 293 cells, (e.g., for packaging adenovirus), and .psi.2 cells or PA317 cells (e.g., for packaging retrovirus). Viral vectors can be generated by producing a cell line that packages a nucleic acid vector into a viral particle. The vectors can contain the minimal viral sequences required for packaging and subsequent integration into a host. The vectors can contain other viral sequences being replaced by an expression cassette for the polynucleotide(s) to be expressed. The missing viral functions can be supplied in trans by the packaging cell line. For example, AAV vectors can comprise ITR sequences from the AAV genome which are required for packaging and integration into the host genome. In some embodiment, the polynucleotides are a DNA polynucleotide. In some embodiment, the poly nucleotides are an RNA polynucleotide; e.g., an mRNA polynucleotide.

[0498] In some embodiments, the AAV vector is selected for tropism to a particular cell, tissue, organism. In some embodiments, the AAV vector is pseudotyped, e.g. AAV5/8. In some embodiments, polynucleotides encoding one or more prime editing composition components are packaged in a first AAV and a second AAV. In some embodiments, the polynucleotides encoding one or more prime editing composition components are packaged in a first rAAV and a second rAAV.

[0499] In some embodiments, dual AAV vectors are generated by splitting a large transgene expression cassette in two separate halves (5′ and 3′ ends that encode N-terminal portion and C-terminal portion of, e.g., a prime editor polypeptide), where each half of the cassette is no more than 5kb in length, optionally no more than 4.7 kb in length, and is packaged in a single AAV vector. In some embodiments, the full-length transgene expression cassette is reassembled upon co-infection of the same cell by both dual AAV vectors. In some embodiments, a portion or fragment of a prime editor polypeptide, e.g., a Cas9 nickase, is fused to an intein. The portion or fragment of the polypeptide can be fused to the N-terminus or the C-terminus of the intein. In some embodiments, a N-terminal portion of the polypeptide is fused to an intein-N, and a C-terminal portion of the polypeptide is separately fused to an intein-C. In some embodiments, a portion or fragment of a prime editor fusion protein is fused to an intein and fused to an AAV capsid protein. In some embodiments, intein-N may be fused to the N-terminal portion of a first domain described herein, and intein-C may be fused to the C-terminal portion of a second domain described herein for the joining of the N-terminal portion to the C-terminal portion, thereby joining the first and second domains. In some embodiments, the first and second domains are each independently chosen from a DNA binding domain or a DNA polymerase domain. The intein, nuclease and capsid protein can be fused together in any arrangement (e.g., nuclease-intein-capsid, intein-nuclease-capsid, capsid-intein-nuclease, etc.). In some embodiments, a polynucleotide encoding a prime editor fusion protein is split in two separate halves, each encoding a portion of the prime editor fusion protein and separately fused to an intein. In some embodiments, each of the two halves of the polynucleotide is packaged in an individual AAV vector of a dual AAV vector system. In some embodiments, each of the two halves of the polynucleotide is no more than 5kb in length, optionally no more than 4.7 kb in length. In some embodiments, the full-length prime editor fusion protein is reassembled upon co-infection of the same cell by both dual AAV vectors, expression of both halves of the prime editor fusion protein, and self-excision of the inteins.

[0500] In some embodiments, the in vivo use of dual AAV vectors results in the expression of full-length prime editor fusion proteins. In some embodiments, the use of the dual AAV vector platform allows viable delivery of transgenes of greater than about 4.5, 4.6, 4.7, 4.8, 4.9, or 5.0 kb in size.

[0501] In some embodiments, an intein is inserted at a splice site within a Cas protein. As used herein, “intein” refers to a self-splicing protein intron (e.g., peptide), e.g., which ligates flanking N-terminal and C-terminal exteins (e.g., fragments to be joined). In some embodiments, an intein may comprise a polypeptide that is able to excise itself and join exteins with a peptide bond (e.g., protein splicing). In some embodiments, an intein of a precursor gene comes from two genes (e.g., split intein). In some embodiments, an intein may be a synthetic intein. Non-limiting examples of intein pairs that may be used in accordance with the present disclosure include: dnaE-n and dnaE-c, a 4-hydroxytamoxifen (4-HT)-responsive intein, an iCas molecule, a Ssp DnaX intein, Ter DnaE3 intein, Ter ThyX intein, Rma DnaB intein, Cfa DnaE intein, Ssp GyrB intein, and Rma DnaB intein. In some embodiments, intein fragments may be fused to the N terminal and C-terminal portion of a split Cas protein respectively for joining the fragments of split Cas9.

[0502] In some embodiments, the split Cas9 system may be used in general to bypass the packing limit of the viral delivery vehicles. In some embodiments, a split Cas9 may be a Type II CRISPR system Cas9. In some embodiments, a first nucleic acid encodes a first portion of the Cas9 protein having a first split-intein and wherein the second nucleic acid encodes a second portion of the Cas9 protein having a second split-intein complementary to the first split-intein and wherein the first portion of the Cas9 protein and the second portion of the Cas9 protein are joined together to form the Cas9 protein. In some embodiments, the first portion of the Cas9 protein is the N-terminal fragment of the Cas9 protein and the second portion of the Cas9 protein is the C-terminal fragment of the Cas9 protein. In some embodiments, a split site may be selected which are surface exposed due to the sterical need for protein splicing.

[0503] In some embodiments, a Cas protein may be split into two fragments at any C, T, A, or S. In some embodiments, a Cas9 may be intein split at residues 203-204, 280-292, 292-364, 311-325, 417-438, 445-483, 468-469, 481-502, 513-520, 522-530, 565-637, 696-707, 713-714, 795-804, 803-810, 878-887, and 1153-1154. In some embodiments, protein is divided into two fragments at SpCas9 T310, T313, A456, S469, or C574. In some embodiments, split Cas9 fragments across different split pairs yield combinations that provided the complete polypeptide sequence activate gene expression even when fragments are partially redundant. In some embodiments, a functional Cas9 protein may be reconstituted from two inactive split-Cas9 peptides in the presence of gRNA by using a split-intein protein splicing strategy. In some embodiment, the split Cas9 fragments are fused to either a N-terminal intein fragment or a C-terminal intein fragment, which can associate with each other and catalytically splice the two split Cas9 fragments into a functional reconstituted Cas9 protein. In some embodiments, a split-Cas9 can be packaged into self-complementary AAV. In some embodiments, a split-Cas9 comprises a 2.5 kb and a 2.2 kb fragment of S. pyogenes Cas9 coding sequences.

[0504] In some embodiments, a split-Cas9 architecture reduces the length and/or size of the coding sequences of a viral vector, e.g., AAV.

[0505] A target cell can be transiently or non-transiently transfected with one or more vectors described herein. A cell can be transfected as it naturally occurs in a subject. A cell can be taken or derived from a subject and transfected. A cell can be derived from cells taken from a subject, such as a cell line. In some embodiments, a cell transfected with one or more vectors described herein can be used to establish a new cell line comprising one or more vector-derived sequences. In some embodiments, a cell transiently transfected with the compositions of the disclosure (such as by transient transfection of one or more vectors, or transfection with RNA), and modified through the activity of a prime editor, can be used to establish a new cell line comprising cells containing the modification but lacking any other exogenous sequence. Any suitable vector compatible with the host cell can be used with the methods of the disclosure. Non-limiting examples of vectors include pXT1, pSG5, pSVK3, pBPV, pMSG, and pSVLSV40.

[0506] In some embodiments, a prime editor protein can be provided to cells as a polypeptide. In some embodiments, the prime editor protein is fused to a polypeptide domain that increases solubility of the protein. In some embodiments, the prime editor protein is formulated to improve solubility of the protein.

[0507] In some embodiment, a prime editor polypeptide is fused to a polypeptide permeant domain to promote uptake by the cell. In some embodiments, the permeant domain is a including peptide, a peptidomimetic, or a non-peptide carrier. For example, a permeant peptide may be derived from the third alpha helix of Drosophila melanogaster transcription factor Antennapaedia, referred to as penetratin, which comprises the amino acid sequence RQIKIWFQNRRMKWKK (SEQ ID NO: 7607). As another example, the permeant peptide can comprise the HIV-1 tat basic region amino acid sequence, which may include, for example, amino acids 49-57 of naturally-occurring tat protein. Other permeant domains can include poly-arginine motifs, for example, the region of amino acids 34-56 of HIV-I rev protein, nona-arginine (SEQ ID NO: 7623), and octa-arginine (SEQ ID NO: 7624). The nona-arginine (R9) sequence can be used. The site at which the fusion can be made may be selected in order to optimize the biological activity, secretion or binding characteristics of the polypeptide.

[0508] In some embodiments, a prime editor polypeptide is produced in vitro or by host cells, and it may be further processed by unfolding, e.g., heat denaturation, DTT reduction, etc. and may be further refolded. In sonic embodiments, a prime editor polypeptide is prepared by in vitro synthesis. Various commercial synthetic apparatuses can be used. By using synthesizers, naturally occurring amino acids can be substituted with unnatural amino acids. In some embodiments, a prime editor polypeptide is isolated and purified in accordance with recombinant synthesis methods, for example, by expression in a host cell and the lysate purified using HPLC, exclusion chromatography, gel electrophoresis, affinity chromatography, or other purification technique.

[0509] In some embodiments, a prime editing composition, for example, prime editor polypeptide components and PEgRNA/ngRNA are introduced to a target cell by nanoparticles. In some embodiments, the prime editor polypeptide components and the PEgRNA and/or ngRNA form a complex in the nanoparticle. Any suitable nanoparticle design can be used to deliver genome editing system components or nucleic acids encoding such components. In some embodiments, the nanoparticle is inorganic. In some embodiments, the nanoparticle is organic. In some embodiments, a prime editing composition is delivered to a target cell, e.g., a hepatocyte, in an organic nanoparticle, e.g., a lipid nanoparticle (LNP) or polymer nanoparticle.

[0510] In some embodiments, LNPs are formulated from cationic, anionic, neutral lipids, or combinations thereof. In some embodiments, neutral lipids, such as the fusogenic phospholipid DOPE or the membrane component cholesterol, are included to enhance transfection activity and nanoparticle stability. In some embodiments, LNPs are formulated with hydrophobic lipids, hydrophilic lipids, or combinations thereof. Lipids may be formulated in a wide range of molar ratios to produce an LNP. Any lipid or combination of lipids that are known in the art can be used to produce an LNP. Exemplary lipids used to produce LNPs are provided in Table 55 below.

[0511] In some embodiments, components of a prime editing composition form a complex prior to delivery to a target cell. For example, a prime editor fusion protein, a PEgRNA, and/or a ngRNA can form a complex prior to delivery to the target cell. In some embodiments, a prime editing polypeptide (e.g., a prime editor fusion protein) and a guide polynucleotide (e.g., a PEgRNA or ngRN) form a ribonucleoprotein (R-3) for deliver to a target cell. In some embodiments, the RIP comprises a prime editor fusion protein in complex with a PEgRNA. RNPs may be delivered to cells using known methods, such as electroporation, nucleofection, or cationic lipid-mediated methods, or any other approaches known in the art. In some embodiments, delivery of a prime editing composition or complex to the target cell does not require the delivery of foreign DNA into the cell. In some embodiments, the RNP comprising the prime editing complex is degraded over time in the target cell. Exemplary lipids for use in nanoparticle formulations and/or gene transfer are shown in Table 55 below.

TABLE 55
Exemplary lipids for nanoparticle formulation or gene transfer

| Lipid | Abbreviation | Featuure |
|---|---|---|
| 1,2-Dioleoyl-sn-glycero-3-phosphatidylcholine | DOPC | Helper |
| 1,2-Dioleoyl-sn-glycero-3- | DOPE | Helper |
| phosphatidylethanolamine | | |
| Cholesterol | | Helper |
| N41-(2,3-Dioleyloxy)prophyliN,N,N- | DOTMA | Cationic |
| trimethylammonium chloride | | |
| 1,2-Dioleoyloxy-3-trimethylammonium-propane | DOGS | Cationic |
| Dioctadecylamidoglycylspermine | | |
| N-(3-Aminopropy1)-N,N-dimethy1-2,3-bis | GAP-DLRIE | Cationic |
| (dodecyloxy)-1-propanaminium bromide | | |
| Cetyltrimethylammonium bromide | CTAB | Cationic |
| 6-Lauroxyhexyl omithinate | LHON | Cationic |
| 1-(2,3-Dioleoyloxypropy1)-2,4,6-trimethyl- | 2Oc | Cationic |
| pyridinium | | |
| 2,3-Dioleyloxy-N-P(spenninecarboxamido- | DOSPA | Cationic |
| ethy1J-N,Ndimethyl-1-propanatinium | | |
| trilfuoroacetate | | |
| 1,2-Dioley1-3-trimethylamtonium-propane | DOPA | Cationic |
| N-(2-Hydroxyethyl)-N,N-dimethy1-2,3- | MDRIE | Cationic |
| bis(tetradecyloxy)-1-propanaminium bromide | | |
| Dimyristooxypropyl dimethyl hydroxyethyl | DMRI | Cationic |
| ammonium bromide | | |
| 3β-[N-(N’, N’-Dimethylaminoethane)- | DC-Chol | Cationic |
| carbamoyl]cholesterol | | |
| Bis-guanidium-tren-cholesterol | BGTC | Cationic |
| 1,3-Diodeoxy-2-(6-carboxy-spermy1)-propylamide | DOSPER | Cationic |
| Dimethyloctadecylammonium bromide | DDAB | Cationic |
| Dioctadecylamidoglicylspermidin | DSL | Cationic |
| rac-[2,3-Dioctadecyloxypropyl)(2-hydroxyethyl)]- | CLIP-1 | Cationic |
| dimethylammonium chloride | | |
| rac-[2(2,3-Dihexadecyloxypropyloxymethyloxy) | CLIP-6 | Cationic |
| ethyl]trimethylammonium bromide | | |
| Ethyldimyristoylphosphatidylcholine | EDMPC | Cationic |
| 1,2-Distearyloxy-N,N-dimethyl-3-aminopropane | DSDMA | Cationic |
| 1,2-Dimyristoyl-trimethylammonium propane | DMTAP | Cationic |
| O,O’-Dimyristyl-N-lysyl aspartate | DMKE | Cationic |
| 1,2-Distearoyl-sn-glycero-3-ethylpho sphocholine | DSEPC | Cationic |
| N-Palmitoyl D-erythro-sphingosyl | CCS | Cationic |
| carbamoyl-spenmine | | |
| N-t-Butyl-N0-tetradecyl-3- | diC14- | Cationic |
| tetradecylaminopropionamidine | amidine | |
| Octadecenolyoxy[ethyl-2-heptadecenyl-3 | DOTIM | Cationic |
| hydroxyethyl]imidazolinium chloride | | |
| N1-Cholesteryloxycarbonyl-3,7-diazanonane- | CDAN | Cationic |
| 1,9-diamine | | |
| 2-(3-Bis(3-amino-propy1)-amino]propylamino- | RPR209120 | Cationic |
| Nditetradecylcarbamoylme-ethyl-acetamide | | |
| 1,2-dilinoleyloxy-3-dimethylaminopropane | DLinDMA | Cationic |
| 2,2-dilinoley1-4-dimethylaminoethyl-[1,3]- | DLin- | Cationic |
| dioxolane | KC2-DMA | |
| dilinoleyl-methyl-4-dimethylaminobutyrate | DLin- | Cationic |
| | MC3-DMA | |

[0512] Exemplary polymers for use in nanoparticle formulations and/or gene transfer are shown in Table 56 below

TABLE 56
Exemplary lipids for nanoparticle formulation or gene transfer

| Polymer | Abbreviation |
|---|---|
| Poly(ethylene)glycol | PEG |
| Polyethylenimine | PEI |
| Dithiobis (succinimidylpropionate) | DSP |
| Dimethyl-3,3′-dithiobispropionimidate | DTBP |
| Poly(ethylene imine)biscarbamate | PEIC |
| Poly(L-lysine) | PLL |
| Histidine modified PLL | |
| Poly(N-vinylpyrrolidone) | PVP |
| Poly(propylenimine) | PPI |
| Poly(amidoamine) | PAMAM |
| Poly(amidoethylenimine) | SS_PAEI |
| Triethylenetetramine | TETA |
| Poly(β-aminoester) | |
| Poly(4-hydroxy-L-proline ester) | PHP |
| Poly(allylamine) | |
| Poly(α-[4-aminobutyl]-L-glycolic acid) | PAGA |
| Poly(D,L-lactic-co-glycolic acid) | PLGA |
| Poly(N-ethyl-4-vinylpyridinium bromide) | |
| Poly(phosphazene)s | PPZ |
| Poly(phosphoester)s | PPE |
| Poly(phosphoramidate)s | PPA |
| Poly(N-2-hydroxypropylmethacrylamide) | pHPMA |
| Poly (2-(dimethylamino)ethyl methacrylate) | pDMAEMA |
| Poly(2-aminoethyl propylene phosphate) | PPE-EA |
| Chitosan | |
| Galactosylated chitosan | |
| N-dodacylated chitosam | |
| Histone | |
| Collagen | |
| Dextran-spermine | D-SPM |

[0513] Exemplary delivery methods for polynucleotides encoding prime editing composition components are shown in Table 57 below.

TABLE 57
Exemplary polynucleotide delivery methods

| | | Delivery into | | | Type of |
|---|---|---|---|---|---|
| | | Non-Dividing | Duration of | Genome | Molecule |
| Delivery | Vector/Mode | Cells | Expression | Integration | Delivered |
| Physical | (e.g., electroporation, | YES | Transient | NO | Nucleic Acids |
| | particle gun, Calcium | | | | and Proteins |
| | phosphate transfection) | | | | |
| Viral | Retrovirus | NO | Stable | YES | RNA |
| | Lentivirus | YES | Stable | YES/NO with | RNA |
| | | | | modification | |
| | Adenovirus | YES | Transient | NO | DNA |
| | Adeno-Associated | YES | Stable | NO | DNA |
| | Virus (AAV) | | | | |
| | Vaccinia Virus | YES | Very Transient | NO | DNA |
| | Herpes Simplex Virus | YES | Stable | NO | DNA |
| Non-Viral | Cationic | YES | Transient | Depends on what | Nucleic acids and |
| | | | | is delivered | Proteins |
| | Polymeric | YES | Transient | NO | Nucleic Acids |
| | Nanoparticles | | | | |
| Biological | Attenuated Bacteria | YES | Transient | NO | Nucleic Acids |
| Non-Viral | Engineered | YES | Transient | NO | Nucleic Acids |
| Delivery | Bacteriophages | | | | |
| Vehicles | Mammalian Virus-like | YES | Transient | NO | Nucleic Acids |
| | Particles | | | | |
| | Biological liposomes: | YES | Transient | NO | Nucleic Acids |
| | Erythrocyte Ghosts and | | | | |
| | Exosomes | | | | |

[0514] The prime editing compositions of the disclosure, whether introduced as polynucleotides or polypeptides, can be provided to the cells for about 30 minutes to about 24 hours, e.g., 1 hour, 1.5 hours, 2 hours, 2.5 hours, 3 hours, 3.5 hours 4 hours, 5 hours, 6 hours, 7 hours, 8 hours, 12 hours, 16 hours, 18 hours, 20 hours, or arty other period from about 30 minutes to about 24 hours, which can be repeated with a frequency of about every day to about every 4 days, e.g., every 1.5 days, every 2 days, every 3 days, or any other frequency from about every day to about every four days. The compositions may be provided to the subject cells one or more times, e.g., one time, twice, three times, or more than three times, and the cells allowed to incubate with the agent(s) for some amount of time following each contacting event e.g., 16-24 hours. In cases in which two or more different prime editing system components, e.g., two different polynucleotide constructs are provided to the cell (e.g., different components of the same prim editing system, or two different guide nucleic acids that are complementary to different sequences within the same or different target genes), the compositions may be delivered simultaneously (e.g., as two polypeptides and/or nucleic acids). Alternatively, they may be provided sequentially. e.g., one composition being provided first, followed by a second composition.

[0515] The prime editing compositions and pharmaceutical compositions of the disclosure, whether introduced as polynucleotides or polypeptides, can be administered to subjects in need thereof for about 30 minutes to about 24 hours, e.g., 1 hour, 1.5 hours. 2 hours. 2.5 hours, 3 hours, 3.5 hours 4 hours, 5 hours, 6 hours, 7 hours, 8 hours, 12 hours, 16 hours, 18 hours, 20 hours, or any other period from about 30 minutes to about 24 hours, which can be repeated with a frequency of about every day to about every 4 days, e.g., every 1.5 days, every 2 days, every 3 days, or any other frequency from about every day to about every four days. The compositions may be provided to the subject one or more times, e.g., one time, twice, three times, or more than three times. In cases in which two or more different prime editing system components, e.g., two different polynucleotide constructs are administered to the subject (e.g., different components of the same prim editing system, or two different guide nucleic acids that are complementary to different sequences within the same or different target genes), the compositions may be administered simultaneously (e.g., as two polypeptides and/or nucleic acids). Alternatively, they may be provided sequentially, e.g., one composition being provided first, followed by a second composition.

### EXAMPLES

[0516] The following examples are provided for illustrative purposes only and are not intended to limit the scope of the claims provided herein.

### Example 1—General Methods and Cell Line Production

[0517] PEgRNA assembly: PEgRNAs were chemically synthesized and modifications were introduced according to manufacturer's standard procedure (Integrated DNA Technologies). Alternatively, PEgRNA may be cloned with any of the following methods: in the first method, pooled synthesized DNA oligos encoding the PEgRNA and flanking U6 expression plasmid homology regions may be cloned into U6 expression plasmids via Gibson cloning and sequencing of bacterial colonies via Sanger or Next-generation sequencing. In the second method, double-stranded linear DNA fragments encoding PEgRNA and homology sequences as above may be individually Gibson-cloned into U6 expression plasmids. In the third method, for each PEgRNA, separate oligos encoding a protospacer, a gRNA scaffold, and PEgRNA extension (PBS and RTT) may be ligated, and then cloned into a U6 expression plasmid as described in Anzalone et al., Nature. 2019 December; 576(7785):149-157. Bacterial colonies carrying sequence-verified plasmids are propagated in LB or TB. Plasmid DNA can be purified by minipreps for mammalian transfection.

[0518] Where indicated, chemically synthesized PEgRNAs are modified at the 5′ end and the 3′end: the three 5′ most nucleotides were modified to phosphorothioated 2′-O-methyl nucleotides. The three consecutive nucleotides that precedes the 3′ most nucleotide (i.e. three consecutive nucleotides immediately 5′ of the last nucleotide at the 3′ end) were also modified to phosphorothioated 2′-O-methyl nucleotides.

[0519] HEK cell culture and transfection for PE2 and PE3 screen: HEK293T cells are propagated in DMEM with 10% FBS. Prior to transfection, cells are seeded in 96-well plates and then transfected with Lipofectamine 2000 or MessengerMax according to the manufacturer's directions with PEgRNA, mRNA encoding a Prime Editor, (and ngRNA for PE3 screen). Three days after transfection, gDNA is harvested in lysis buffer for high throughput sequencing and sequenced using Miseq.

[0520] USH2A 2299delG or 2276 G4T mutation installation: PEgRNAs having spacers adjacent to a NGG PAM are designed to incorporate a c.2299delG or a c. 2276 G->T mutation in wild type endogenous USH2A gene in HEK 293T cells by prime editing as a proxy to examine editing efficiency. A PE2 screen measuring editing frequency and indel formation is performed as described above at the USH2A locus corresponding to the c.2299delG or c.2276 G->T position.

[0521] Lentiviralproduction and cell line generation: Lentiviral transfer plasmids containing the USH2A c.2299delG mutation with flanking sequences from the USH2A gene on each side, and an IRES-Puromycin selection cassette, were cloned behind an EFla short promoter. HEK 293T cells were transiently transfected with the transfer plasmids and packaging plasmids containing VSV glycoprotein and lentiviral gag/pol coding sequences. After transfection, lentiviral particles were harvested from the cell media and concentrated. HEK 293T cells were transduced using serial dilutions of the lentiviral particles described above. Cells generated at a dilution of MOI <1, as determined by survival following puromycin, were selected for expansion. A resulting HEK293T cell lines carrying the c.2299delG mutation or mutations are used to screen PEgRNAs.

USH2A c.2299delG Mutation Correction with PE2 System:

[0522] PEgRNAs having spacers adjacent to a NGG PAM were designed to correct the c.2299delG mutation in HEK 293T cells by prime editing. The HEK 293T_USH2Ac.2299delG cell line as described above is expanded and transiently transfected with PEgRNA and mRNA encoding a prime editor in arrayed 96-well plates for assessment of editing by high-throughput sequencing. Prior to transfection, cells are seeded in 96-well plates and then transfected with Lipofectamine 2000 or MessengerMax according to the manufacturer's directions. Three days after transfection, gDNA is harvested in lysis buffer for high throughput sequencing and sequenced using Miseq. Indel frequency is quantified using standard quantification techniques via CRISPResso2 algorithm as described in Clement, K. et al., Nat. Biotechnol. 37, 224-226 (2019), with the quantification window defined as at least 20 bases 5′ and 3′ of PEgRNA nick site.

USH2A c.2299delG Mutation Correction with PE3 System:

[0523] PEgRNAs and ngRNAs having spacers adjacent to compatible PAMs on opposing strands are designed to correct the c.2299delG mutation in HEK 293T cells by prime editing. Chemically synthesized PEgRNAs and ngRNAs are modified at the 5′ end and the 3′end: the three 5′ most nucleotides are modified to phosphorothioated 2′-O-methyl nucleotides. The three consecutive nucleotides that precedes the 3′ most nucleotide (i.e., three consecutive nucleotides immediately 5′ of the last nucleotide at the 3′ end) are also modified to phosphorothioated 2′-O-methyl nucleotides.

[0524] The HEK 293T_USH2Ac.2299delG cell line as described above is expanded and transiently transfected with PEgRNA, ngRNA, and mRNA encoding PE2 fusion protein, in arrayed 96-well plates for assessment of editing by high-throughput sequencing. Prior to transfection, cells are seeded in 96-well plates and then transfected with Lipofectamine 2000 or MessengerMax according to the manufacturer's directions with DNA or RNA encoding a prime editor, PEgRNA, and ngRNA. Three days after transfection, gDNA is harvested in lysis buffer for high throughput sequencing and sequenced using Miseq. Indel frequency is quantified using standard quantification techniques via CRISPResso2 algorithm as described in Clement, K. et al., Nat. Biotechnol. 37, 224-226 (2019), with the quantification window defined as at least 20 bases 5′ and 3′ of pngRNA nick site.

### Example 2—Spacer Screen for Cas9 Cutting Activity Near c.2299delG and c.2276G4 T Mutation Sites in Endogenous USH2a Gene of HEK293T Cells

[0525] A spacer screen was performed to investigate Cas9 cutting activity at sites having an NGG or NGA PAM within 100 nucleotides (nts) of the c.2276 G->T mutation site in the USH2a gene. HEK293T cells were cultured and transfected with mRNA encoding a Cas9 and sgRNA as described above. The c.2276 G->T mutation site is located near the c.2299delG mutation site. Based on their location relative to these mutations, and the strand to which they bind, the indicated spacers can be used to edit one or both of these sites when used in a PEgRNA with a prime editor having a Cas9 with an inactivating mutation in the HNH domain. The mutations that can be targeted by a given spacer are listed in the Target column of Table 45. The results are shown in Table 45. A number of spacers having good cutting activity near these mutation sites were identified.

TABLE 45
Spacer screen for Cas9 cutting activity near c.2299delG and c.2276G→T
mutation sites in endogenous USH2a gene of HEK293T cells

| | | | Nick-to-edit | |
|---|---|---|---|---|
| Spacer Sequence¹ | PAM | Target² | distance (nt) | % Indel³ |
| AGGTGTGATCATTGCAATTT | TGG | 2276, 2299 | 87 | + |
| (SEQ ID NO: 138) | | | | |
| CTCCGAAGCTTTAATGATGT | TGG | 2276, 2299 | 54 | +++ |
| (SEQ ID NO: 41) | | | | |
| CCCTGCCAGTGTAACCTCCA | TGG | 2276, 2299 | 24 | ++++ |
| (SEQ ID NO: 38) | | | | |
| ACAGTCACAGGCCTTACAAT | TGG | 2299, 2276 | 99 | +++ |
| (SEQ ID NO: 5971) | | | | |
| GGTGTCACACTGAAGTCCTT | TGG | 2299, 2276 | 45 | ++++ |
| (SEQ ID NO: 3564) | | | | |
| CACTCACACTGCCCAGAGTG | AGG | 2276 | 11 | +++ |
| (SEQ ID NO: 2008) | | | | |
| AAATTTCTCCGAAGCTTTAA | TGA | 2276, 2299 | 60 | + |
| (SEQ ID NO: 31) | | | | |
| TCCGAAGCTTTAATGATGTT | GGA | 2276, 2299 | 53 | ++ |
| (SEQ ID NO: 49) | | | | |
| AGCTTTAATGATGTTGGATG | TGA | 2276, 2299 | 48 | ++++ |
| (SEQ ID NO: 34) | | | | |
| GTGTAACCTCCATGGCTCAG | TGA | 2276, 2299 | 16 | ++++ |
| (SEQ ID NO: 48) | | | | |
| GTCACAGGCCTTACAATTGG | TGA | 2299, 2276 | 96 | ++ |
| (SEQ ID NO: 5973) | | | | |
| TTTCTCTGCAGGTGTCACAC | TGA | 2299, 2276 | 55 | ++ |
| (SEQ ID NO: 380) | | | | |
| TGCACTCACACTGCCCAGAG | TGA | 2276 | 13 | ++++ |
| (SEQ ID NO: 2090) | | | | |
| ACTCACACTGCCCAGAGTGA | GGA | 2276 | 10 | ++ |
| (SEQ ID NO: 1898) | | | | |
| CTGCCCAGAGTGAGGATTGC | AGA | 2276 | 3 | + |
| (SEQ ID NO: 4519) | | | | |
| AATTCTGCAATCCTCACTCT | GGG | 2299 | 14 | +++ |
| (SEQ ID NO: 33) | | | | |
| AAATTCTGCAATCCTCACTC | TGG | 2299 | 15 | + |
| (SEQ ID NO: 30) | | | | |
| AATCCTCACTCTGGGCAGTG | TGA | 2299 | 6 | + |
| (SEQ ID NO: 32) | | | | |

¹Indicated spacer sequence was used in a synthetic sgRNA having the following scaffold: GTTTTAGAGCTAGAAATAGCAAGTTAAAATAAGGCTAGTCCGTTATCAACTTGAAAAAGTGGCACCG AGTCGGTGCTTTT (SEQ ID NO: 7543). The experimental sequence further contained 3′ mN*mN*mN*N and 5'mN*mN*mN*N modifications, where m indicates that the nucleotide contains a 2′-O-Me modification and a * indicates a phosphorothioate bond.
²The indicated spacer, when used in a PEgRNA with a Prime Editor having a Cas9 having an inactivating mutation in the HNH domain, produces a 5′ flap oriented towards the indicated mutations. The first listed mutation site is closer to the nick site; the bolded mutation site is used in the nick-to-edit distance calculation.
³+ = 0.01%-26.26%; ++ = 26.26%-55.09%; +++ = 55.09%-68.88%; ++++ = 68.88%-84.05%.
Data is average of two technical replicates.

### Example 3—Prime Editing at a Lentivirus-Introduced USH2A c.2299de1G Mutation Site in HEK293T Cells with a PEgRNA (PE2 System)

[0526] Two spacers near the c.2299delG mutation site in the USH2a gene were selected and used to design PEgRNA for correction of the c.2299delG mutation site. PEgRNA based on SEQ ID NO: 33, and compatible ngRNA for a PE3 system, are disclosed in Table 13. PEgRNA based on SEQ ID NO: 30, and compatible ngRNA for a PE3 system, are disclosed in Table 15.

[0527] PEgRNA were designed and screened in a PE2 system as described above. An HEK 293T cell line containing a lentivirus-introduced USH2A c.2299delG mutation site was generated as described above and was expanded and transiently transfected with a prime editor and synthetic PEgRNA in arrayed 96-well plates for assessment ofediting by high-throughput sequencing. Genomic DNA (gDNA) was harvested in lysis buffer for high throughput sequencing and sequenced using Miseq. Indel frequency was quantified using standard quantification techniques via CRJSPResso2 algorithm as described in Clement, K. et al., Nat. Biotechnol. 37, 224-226 (2019), with the quantification window defined as at least 20 bases 5′ and 3′ of PEgRNA nick site.

[0528] In this screen, multiple primer binding site (PBS) and reverse transcription template (RTT) lengths were tested. All the PEgRNA were designed to restore the wild-type nucleic acid sequence at the c.2299delG site. Where possible, PEgRNAs were designed to also introduce synonymous mutations that silence the PAM sequence. The results for individual PEgRNA are shown in Table 46. Successful Prime Editing was observed across PBS and RTT lengths, with and without PAM silencing.

TABLE 46
Prime Editing at a lentivirus-introduced USH2A c.2299delG mutation site in
HEK293T cells with a PEgRNA (PE2 system)

| PEgRNA¹ | | RTT² | | PBS | | | |
|---|---|---|---|---|---|---|---|
| Sequence | Spacer | Sequence | RTT | Sequence | PBS | | |
| Number | Sequence Number | Number | Length | Number | Length | % Edit³ | % Indel³ |
| 6158 | 33 | 6044* | 18 | 6018 | 10 | +++ | ++ |
| 6157 | 33 | 6043 | 18 | 6018 | 10 | +++ | ++ |
| 6173 | 33 | 6048* | 19 | 6018 | 10 | ++++ | ++ |
| 6172 | 33 | 6047 | 19 | 6018 | 10 | ++++ | ++ |
| 6194 | 33 | 6052* | 20 | 6018 | 10 | ++++ | ++ |
| 6200 | 33 | 6051 | 20 | 6018 | 10 | ++++ | ++ |
| 6221 | 33 | 6056* | 21 | 6018 | 10 | ++++ | ++ |
| 6220 | 33 | 6055 | 21 | 6018 | 10 | ++++ | ++ |
| 6251 | 33 | 6060* | 22 | 6018 | 10 | ++++ | + |
| 6261 | 33 | 6059 | 22 | 6018 | 10 | +++ | + |
| 6170 | 33 | 6044* | 18 | 6019 | 11 | ++++ | + |
| 6179 | 33 | 6043 | 18 | 6019 | 11 | +++ | + |
| 6192 | 33 | 6048* | 19 | 6019 | 11 | ++++ | + |
| 6199 | 33 | 6047 | 19 | 6019 | 11 | +++ | + |
| 6218 | 33 | 6052* | 20 | 6019 | 11 | ++++ | ++ |
| 6228 | 33 | 6051 | 20 | 6019 | 11 | ++++ | ++ |
| 6249 | 33 | 6056* | 21 | 6019 | 11 | ++++ | ++ |
| 6260 | 33 | 6055 | 21 | 6019 | 11 | +++ | ++ |
| 6289 | 33 | 6060* | 22 | 6019 | 11 | ++++ | ++ |
| 6297 | 33 | 6059 | 22 | 6019 | 11 | +++ | + |
| 6189 | 33 | 6044* | 18 | 6020 | 12 | ++++ | ++ |
| 6187 | 33 | 6043 | 18 | 6020 | 12 | +++ | + |
| 6215 | 33 | 6048* | 19 | 6020 | 12 | ++++ | + |
| 6213 | 33 | 6047 | 19 | 6020 | 12 | +++ | ++ |
| 6246 | 33 | 6052* | 20 | 6020 | 12 | ++++ | ++ |
| 6258 | 33 | 6051 | 20 | 6020 | 12 | ++++ | + |
| 6286 | 33 | 6056* | 21 | 6020 | 12 | +++ | + |
| 6284 | 33 | 6055 | 21 | 6020 | 12 | ++++ | + |
| 6323 | 33 | 6060* | 22 | 6020 | 12 | ++++ | ++ |
| 6333 | 33 | 6059 | 22 | 6020 | 12 | ++++ | ++ |
| 6209 | 33 | 6044* | 18 | 6021 | 13 | +++ | + |
| 6226 | 33 | 6043 | 18 | 6021 | 13 | +++ | + |
| 6242 | 33 | 6048* | 19 | 6021 | 13 | +++ | + |
| 6256 | 33 | 6047 | 19 | 6021 | 13 | +++ | ++ |
| 6280 | 33 | 6052* | 20 | 6021 | 13 | ++++ | + |
| 6295 | 33 | 6051 | 20 | 6021 | 13 | ++++ | + |
| 6319 | 33 | 6056* | 21 | 6021 | 13 | ++++ | ++ |
| 6331 | 33 | 6055 | 21 | 6021 | 13 | ++++ | ++ |
| 6362 | 33 | 6060* | 22 | 6021 | 13 | ++++ | ++ |
| 6372 | 33 | 6059 | 22 | 6021 | 13 | +++ | + |
| 6145 | 33 | 6044* | 18 | 6016 | 8 | +++ | ++ |
| 6144 | 33 | 6043 | 18 | 6016 | 8 | ++++ | ++ |
| 6152 | 33 | 6048* | 19 | 6016 | 8 | +++ | + |
| 6151 | 33 | 6047 | 19 | 6016 | 8 | ++++ | ++ |
| 6162 | 33 | 6052* | 20 | 6016 | 8 | +++ | + |
| 6164 | 33 | 6051 | 20 | 6016 | 8 | ++++ | + |
| 6178 | 33 | 6056* | 21 | 6016 | 8 | +++ | ++ |
| 6177 | 33 | 6055 | 21 | 6016 | 8 | +++ | + |
| 6198 | 33 | 6060* | 22 | 6016 | 8 | ++++ | ++ |
| 6202 | 33 | 6059 | 22 | 6016 | 8 | ++++ | + |
| 6149 | 33 | 6044* | 18 | 6017 | 9 | ++++ | ++ |
| 6153 | 33 | 6043 | 18 | 6017 | 9 | +++ | + |
| 6160 | 33 | 6048* | 19 | 6017 | 9 | +++ | ++ |
| 6163 | 33 | 6047 | 19 | 6017 | 9 | +++ | + |
| 6175 | 33 | 6052* | 20 | 6017 | 9 | +++ | + |
| 6180 | 33 | 6051 | 20 | 6017 | 9 | +++ | + |
| 6196 | 33 | 6056* | 21 | 6017 | 9 | +++ | + |
| 6201 | 33 | 6055 | 21 | 6017 | 9 | +++ | ++ |
| 6223 | 33 | 6060* | 22 | 6017 | 9 | +++ | + |
| 6229 | 33 | 6059 | 22 | 6017 | 9 | +++ | + |
| 7216 | 30 | 7123* | 22 | 7101 | 12 | +++ | ++ |
| 7214 | 30 | 2092 | 22 | 7101 | 12 | +++ | + |

¹Indicated PEgRNA sequence does not contain the 3′ linker and hairpin motif used experimentally. The experimental sequence further contained 3′ mN*mN*mN*N and 5′mN*mN*mN*N modifications, where m indicates that the nucleotide contains a 2′-O-Me modification and a * indicates a phosphorothioate bond.
²+ = 0.00 %-0.02%;
++ = 0.02%-0.48%;
+++ = 0.48%-1.60%;
++++ = 1.60%-15.43%.
³* = RTT encodes a PAM silencing mutation.

### Example 4—Prime Editing at a Lentivirus-Introduced USH2A c.2299delG Mutation Site in HEK293T Cells with a Combination of a PEgRNA and ngRNA (PE3 System)

[0529] PEgRNA and ngRNA were designed and screened in a PE3 system as described above. An HEK 293T cell line containing a lentivirus-introduced USH2A c.2299delG mutation site was generated as described above and was expanded and transiently transfected with a mRNA encoding a prime editor, and synthetic PEgRNA and ngRNA, in arrayed 96-well plates for assessment of editing by high-throughput sequencing. Genomic DNA (gDNA) was harvested in lysis buffer for high throughput sequencing and sequenced using Miseq. Indel frequency was quantified using standard quantification techniques via CRISPResso2 algorithm as described in Clement, K. et al., Nat. Biotechnol. 37, 224-226 (2019), with the quantification window defined as at least 20 bases 5′ and 3′ of PEgRNA nick site.

[0530] All the PEgRNA were designed to restore the wild-type nucleic acid sequence at the c.2299delG site. Where possible, PEgRNAs were designed to also introduce synonymous mutations that silence the PAM sequence. The results of the PE3 screen are provided in Table 47a; the PEgRNA used are summarized in Table 47b. Each PEgRNA was tested with three different ngRNA. Correction of the c.2299delG mutation was demonstrated with each PEgRNA tested, demonstrating that successful prime editing can be achieved across PBS and RTT lengths, both with and without PAM silencing.

TABLE 47a
Prime Editing at a lentivirus-introduced USH2A
c.2299delG mutation site in HEK293T cells
with a combination of a PEgRNA and ngRNA (PE3 system)

| PEgRNA² | ngRNA spacer² Sequence Number: | | | | | |
|---|---|---|---|---|---|---|
| Sequence | 3564 | | 4635 | | 5971 | |
| Number: | % Edit¹ | % indel¹ | % Edit¹ | % indel¹ | % Edit¹ | % indel¹ |
| 6200 | ++ | ++ | + | + | +++ | ++ |
| 6295 | ++ | +++ | +++ | ++ | +++ | ++ |
| 6160 | ++++ | ++ | ++++ | + | ++++ | + |
| 6160 | +++ | ++ | +++ | + | +++ | + |
| 6218 | ++++ | + | ++++ | + | ++++ | + |
| 6228 | +++ | +++ | +++ | ++ | ++++ | ++ |
| 6331 | +++ | +++ | ++++ | ++ | ++++ | ++ |
| 6175 | ++++ | ++ | ++++ | + | ++++ | + |
| 6249 | ++++ | ++ | ++++ | + | ++++ | + |
| 6260 | ++ | +++ | + | + | +++ | ++ |
| 6372 | +++ | +++ | +++ | ++ | ++++ | ++ |
| 6196 | ++++ | ++ | ++++ | + | +++ | + |
| 6289 | ++++ | ++ | ++++ | + | ++++ | + |
| 6297 | +++ | +++ | ++++ | + | ++++ | ++ |
| 6145 | +++ | ++ | +++ | + | +++ | ++ |
| 6189 | +++ | ++ | +++ | + | +++ | + |
| 6258 | +++ | +++ | ++++ | ++ | ++++ | ++ |
| 6162 | +++ | ++ | ++++ | + | ++++ | ++ |
| 6173 | ++++ | ++ | +++ | + | ++++ | + |
| 6246 | ++++ | ++ | ++++ | + | ++++ | + |
| 6284 | +++ | +++ | +++ | ++ | ++++ | ++ |
| 6178 | +++ | ++ | ++++ | + | ++++ | ++ |
| 6194 | ++++ | ++ | ++++ | + | ++++ | + |
| 6286 | ++++ | ++ | ++++ | ++ | +++ | + |
| 6333 | ++ | +++ | +++ | ++ | ++++ | ++ |
| 6198 | +++ | ++ | +++ | + | ++++ | ++ |
| 6221 | +++ | ++ | +++ | + | ++++ | + |
| 6280 | ++++ | + | ++++ | + | ++++ | + |
| 6226 | ++ | ++ | + | + | + | + |
| 6192 | +++ | ++ | +++ | + | +++ | + |
| 6251 | +++ | ++ | +++ | + | +++ | + |
| 6319 | ++++ | ++ | ++++ | + | +++ | + |

¹+ = 0.01%-2.73%;
++ = 2.73%-13.65%;
+++ = 13.65%-31.52%;
++++ = 31.52%-53.68%.
2Indicated sequence does not contain the 3' linker and hairpin motif used experimentally. The experimental sequence further contained 3′ mN*mN*mN*N and 5′mN*mN*mN* modifications, where m indicates that the nucleotide contains a 2′-O-Me modification and a * indicates a phosphorothioate bond. In case of ngRNA, the indicated spacer was combined with the same gRNA core used in the PEgRNA.

TABLE 47b
Summary of PEgRNA used in Table 47a

| PEgRNA³ | Spacer | RTT³ | | PBS | |
|---|---|---|---|---|---|
| Sequence | Sequence | Sequence | RTT | Sequence | PBS |
| Number: | Number: | Number: | Length | Number: | Length |
| 6200 | 33 | 6051 | 20 | 6018 | 10 |
| 6295 | 33 | 6051 | 20 | 6021 | 13 |
| 6160 | 33 | 6048* | 19 | 6017 | 9 |
| 6218 | 33 | 6052* | 20 | 6019 | 11 |
| 6228 | 33 | 6051 | 20 | 6019 | 11 |
| 6331 | 33 | 6055 | 21 | 6021 | 13 |
| 6175 | 33 | 6052* | 20 | 6017 | 9 |
| 6249 | 33 | 6056* | 21 | 6019 | 11 |
| 6260 | 33 | 6055 | 21 | 6019 | 11 |
| 6372 | 33 | 6059 | 22 | 6021 | 13 |
| 6196 | 33 | 6056* | 21 | 6017 | 9 |
| 6289 | 33 | 6060* | 22 | 6019 | 11 |
| 6297 | 33 | 6059 | 22 | 6019 | 11 |
| 6145 | 33 | 6044* | 18 | 6016 | 8 |
| 6189 | 33 | 6044* | 18 | 6020 | 12 |
| 6258 | 33 | 6051 | 20 | 6020 | 12 |
| 6162 | 33 | 6052* | 20 | 6016 | 8 |
| 6173 | 33 | 6048* | 19 | 6018 | 10 |
| 6246 | 33 | 6052* | 20 | 6020 | 12 |
| 6284 | 33 | 6055 | 21 | 6020 | 12 |
| 6178 | 33 | 6056* | 21 | 6016 | 8 |
| 6194 | 33 | 6052* | 20 | 6018 | 10 |
| 6286 | 33 | 6056* | 21 | 6020 | 12 |
| 6333 | 33 | 6059 | 22 | 6020 | 12 |
| 6198 | 33 | 6060* | 22 | 6016 | 8 |
| 6221 | 33 | 6056* | 21 | 6018 | 10 |
| 6280 | 33 | 6052* | 20 | 6021 | 13 |
| 6226 | 33 | 6043 | 18 | 6021 | 13 |
| 6192 | 33 | 6048* | 19 | 6019 | 11 |
| 6251 | 33 | 6060* | 22 | 6018 | 10 |
| 6319 | 33 | 6056* | 21 | 6021 | 13 |

³* = RTT encodes a PAM silencing mutation.

### Example 5—Prime Editing at Endogenous USH2A c.2276 GT Mutation Site in HEK293T Cells with a PEgRNA (PE2 System)

[0531] An USH2A c.2276 G->T mutation was installed at the endogenous USH2A locus in HEK 293T cells by prime editing and single-cell clones were obtained via limiting dilution and clonal expansion. A PE2 screen measuring correction and indel formation was performed at the endogenous USH2A c.2276 G->T locus. The HEK293T cells were transfected with mRNA encoding a prime editor and a synthetic PEgRNA as described in Example 1. Indel frequency was quantified using standard quantification techniques via CRISPResso2 algorithm as described in Clement, K. et al., Nat. Biotechnol. 37, 224-226 (2019), with the quantification window defined as at least 20 bases 5′ and 3′ of pngRNA and ngRNA nick site.

[0532] Five spacers were selected and used to design correction PEgRNAs having various primer biding site and reverse transcription template lengths. All the PEgRNA were designed to correct the c.2276 G->T mutation. The results for individual PEgRNA are shown in Table 48.

TABLE 48
Prime Editing at endogenous USH2A c.2276 G→T mutation
site in HEK293T cells with a PEgRNA (PE2 system)

| PEgRNA¹ | Spacer | RTT | | PBS | | | |
|---|---|---|---|---|---|---|---|
| Sequence | Sequence | Sequence | | Sequence | PBS | | |
| Number | Number | Number | RTT Length | Number | Length | % Edit² | % Indel² |
| 5885 | 38 | 5872 | 28 | 5852 | 8 | + | + |
| 5887 | 38 | 5874 | 30 | 5852 | 8 | + | + |
| 5890 | 38 | 5876 | 32 | 5852 | 8 | + | + |
| 5897 | 38 | 5878 | 34 | 5852 | 8 | + | + |
| 7515 | 38 | 5872 | 28 | 5853 | 9 | + | + |
| 7516 | 38 | 5874 | 30 | 5853 | 9 | ++ | + |
| 7517 | 38 | 5876 | 32 | 5853 | 9 | + | + |
| 7518 | 38 | 5878 | 34 | 5853 | 9 | + | + |
| 5888 | 38 | 5872 | 28 | 5856 | 12 | ++ | + |
| 5895 | 38 | 5874 | 30 | 5856 | 12 | ++ | + |
| 5899 | 38 | 5876 | 32 | 5856 | 12 | ++ | + |
| 5908 | 38 | 5878 | 34 | 5856 | 12 | ++ | + |
| 5892 | 38 | 5872 | 28 | 5858 | 14 | +++ | + |
| 5901 | 38 | 5874 | 30 | 5858 | 14 | ++ | + |
| 5905 | 38 | 5876 | 32 | 5858 | 14 | ++ | + |
| 5912 | 38 | 5878 | 34 | 5858 | 14 | ++ | + |
| 4642 | 48 | 4511 | 20 | 4529 | 8 | ++ | ++++ |
| 4659 | 48 | 4557 | 22 | 4529 | 8 | ++ | ++++ |
| 4686 | 48 | 4565 | 24 | 4529 | 8 | ++ | ++++ |
| 4750 | 48 | 4573 | 26 | 4529 | 8 | ++ | ++ |
| 4652 | 48 | 4511 | 20 | 4531 | 10 | ++ | ++++ |
| 4693 | 48 | 4557 | 22 | 4531 | 10 | ++ | ++++ |
| 4732 | 48 | 4565 | 24 | 4531 | 10 | ++ | ++++ |
| 4834 | 48 | 4573 | 26 | 4531 | 10 | + | ++++ |
| 7519 | 48 | 4511 | 20 | 4532 | 11 | ++ | ++++ |
| 7520 | 48 | 4557 | 22 | 4532 | 11 | ++ | ++++ |
| 7521 | 48 | 4565 | 24 | 4532 | 11 | ++ | ++++ |
| 7522 | 48 | 4573 | 26 | 4532 | 11 | ++ | ++++ |
| 4725 | 48 | 4511 | 20 | 4535 | 14 | ++ | ++++ |
| 4827 | 48 | 4557 | 22 | 4535 | 14 | ++ | ++++ |
| 4906 | 48 | 4565 | 24 | 4535 | 14 | ++ | ++++ |
| 5036 | 48 | 4573 | 26 | 4535 | 14 | ++ | ++++ |
| 7523 | 2090 | 2099 | 17 | 2074 | 7 | ++ | ++++ |
| 7524 | 2090 | 2107 | 19 | 2074 | 7 | +++ | ++++ |
| 7525 | 2090 | 2118 | 22 | 2074 | 7 | ++ | ++++ |
| 7526 | 2090 | 2122 | 23 | 2074 | 7 | ++ | ++++ |
| 7527 | 2090 | 2099 | 17 | 2076 | 9 | +++ | ++++ |
| 7528 | 2090 | 2107 | 19 | 2076 | 9 | +++ | ++++ |
| 7529 | 2090 | 2118 | 22 | 2076 | 9 | ++ | ++++ |
| 7530 | 2090 | 2122 | 23 | 2076 | 9 | ++ | +++ |
| 2227 | 2090 | 2099 | 17 | 2079 | 12 | +++ | ++++ |
| 2255 | 2090 | 2107 | 19 | 2079 | 12 | +++ | ++++ |
| 2342 | 2090 | 2118 | 22 | 2079 | 12 | +++ | ++++ |
| 2368 | 2090 | 2122 | 23 | 2079 | 12 | ++ | +++ |
| 7531 | 2090 | 2099 | 17 | 2080 | 13 | ++ | ++++ |
| 7532 | 2090 | 2107 | 19 | 2080 | 13 | ++ | +++ |
| 7533 | 2090 | 2118 | 22 | 2080 | 13 | ++ | +++ |
| 7534 | 2090 | 2122 | 23 | 2080 | 13 | ++ | +++ |
| 2040 | 2008 | 2014 | 15 | 1993 | 8 | +++ | + |
| 2041 | 2008 | 2016 | 17 | 1993 | 8 | +++ | + |
| 2046 | 2008 | 2019 | 20 | 1993 | 8 | +++ | + |
| 2047 | 2008 | 2020 | 21 | 1993 | 8 | +++ | + |
| 7535 | 2008 | 2014 | 15 | 1994 | 9 | +++ | + |
| 7536 | 2008 | 2016 | 17 | 1994 | 9 | ++++ | ++ |
| 7537 | 2008 | 2019 | 20 | 1994 | 9 | +++ | ++ |
| 7538 | 2008 | 2020 | 21 | 1994 | 9 | +++ | + |
| 7539 | 2008 | 2014 | 15 | 1996 | 11 | +++ | + |
| 7540 | 2008 | 2016 | 17 | 1996 | 11 | ++++ | + |
| 7541 | 2008 | 2019 | 20 | 1996 | 11 | +++ | + |
| 7542 | 2008 | 2020 | 21 | 1996 | 11 | +++ | + |
| 2050 | 2008 | 2014 | 15 | 1999 | 14 | +++ | + |
| 2054 | 2008 | 2016 | 17 | 1999 | 14 | +++ | + |
| 2063 | 2008 | 2019 | 20 | 1999 | 14 | +++ | + |
| 2065 | 2008 | 2020 | 21 | 1999 | 14 | +++ | + |
| 1958 | 1898 | 1905 | 14 | 1883 | 8 | +++ | ++++ |
| 1959 | 1898 | 1909 | 16 | 1883 | 8 | +++ | ++++ |
| 1964 | 1898 | 1915 | 19 | 1883 | 8 | +++ | ++++ |
| 1965 | 1898 | 1917 | 20 | 1883 | 8 | +++ | ++++ |
| 1960 | 1898 | 1905 | 14 | 1885 | 10 | ++ | ++++ |
| 1961 | 1898 | 1909 | 16 | 1885 | 10 | +++ | ++++ |
| 1970 | 1898 | 1915 | 19 | 1885 | 10 | +++ | ++++ |
| 1971 | 1898 | 1917 | 20 | 1885 | 10 | ++ | ++++ |
| 1962 | 1898 | 1905 | 14 | 1887 | 12 | +++ | ++++ |
| 1966 | 1898 | 1909 | 16 | 1887 | 12 | +++ | ++++ |
| 1975 | 1898 | 1915 | 19 | 1887 | 12 | +++ | ++++ |
| 1977 | 1898 | 1917 | 20 | 1887 | 12 | ++ | +++ |
| 1968 | 1898 | 1905 | 14 | 1889 | 14 | ++ | +++ |
| 1972 | 1898 | 1909 | 16 | 1889 | 14 | +++ | ++++ |
| 1981 | 1898 | 1915 | 19 | 1889 | 14 | ++ | +++ |
| 1983 | 1898 | 1917 | 20 | 1889 | 14 | + | +++ |

¹Indicated sequence does not contain the 3′ mT*mT*mT*T motif and 5'mN*mN*mN* modifications used experimentally, where m indicates that the nucleotide contains a 2′-O-Me modification, a * indicates a phosphorothioate bond, and T indicates a uracil has been added to the sequence.
²+ = 0.00%-0.24%;
++ = 0.24%-1.09%;
+++ = 1.09%-24.92%;
++++ = 24.92%-65.33%.

### Sequences and Sequence Tables

Wild-type Usherin Protein, isoform B
>sp|O75445|USH2A_HUMAN Usherin OS = Homo sapiens OX = 9606 GN = USH2A
PE = 1 SV = 3
(SEQ ID NO: 7598)
MNCPVLSLGSGFLFQVIEMLIFAYFASISLTESRGLFPRLENVGAFKKVSIVPTQAVCGL
PDRSTFCHSSAAAESIQFCTQRFCIQDCPYRSSHPTYTALFSAGLSSCITPDKNDLHPNA
HSNSASFIFGNHKSCFSSPPSPKLMASFTLAVWLKPEQQGVMCVIEKTVDGQIVFKLTIS
EKETMFYYRTVNGLQPPIKVMTLGRILVKKWIHLSVQVHQTKISFFINGVEKDHTPFNAR
TLSGSITDFASGTVQIGQSLNGLEQFVGRMQDFRLYQVALTNREILEVFSGDLLRLHAQS
HCRCPGSHPRVHPLAQRYCIPNDAGDTADNRVSRLNPEAHPLSFVNDNDVGTSWVSNVFTNITQ
LNQGVTISVDLENGQYQVFYIIIQFFSPQPTEIRIQRKKENSLDWEDWQYFARNCGAFGMKNNGD
LEKPDSVNCLQLSNFTPYSRGNVTFSILTPGPNYRPGYNNFYNTPSLQEFVKATQIRFHFHGQYY
TTETAVNLRHRYYAVDEITISGRCQCHGHADNCDTTSQPYRCLCSQESFTEGLHCDRCLPLYND
KPFRQGDQVYAFNCKPCQCNSHSKSCHYNISVDPFPFEHFRGGGGVCDDCEHNTTGRNCELCK
DYFFRQVGADPSAIDVCKPCDCDTVGTRNGSILCDQIGGQCNCKRHVSGRQCNQCQNGFYNLQ
ELDPDGCSPCNCNTSGTVDGDITCHQNSGQCKCKANVIGLRCDHCNFGFKFLRSFNDVGCEPCQ
CNLHGSVNKFCNPHSGQCECKKEAKGLQCDTCRENFYGLDVTNCKACDCDTAGSLPGTVCNA
KTGQCICKPNVEGRQCNKCLEGNFYLRQNNSFLCLPCNCDKTGTINGSLLCNKSTGQCPCKLGV
TGLRCNQCEPHRYNLTIDNFQHCQMCECDSLGTLPGTICDPISGQCLCVPNRQGRRCNQCQPGF
YISPGNATGCLPCSCHTTGAVNHICNSLTGQCVCQDASIAGQRCDQCKDHYFGFDPQTGRCQPC
NCHLSGALNETCHLVTGQCFCKQFVTGSKCDACVPSASHLDVNNLLGCSKTPFQQPPPRGQVQS
SSAINLSWSPPDSPNAHWLTYSLLRDGFEIYTTEDQYPYSIQYFLDTDLLPYTKYSYYIETTNVHG
STRSVAVTYKTKPGVPEGNLTLSYIIPIGSDSVTLTWTTLSNQSGPIEKYILSCAPLAGGQPCVSYE
GHETSATIWNLVPFAKYDFSVQACTSGGCLHSLPITVTTAQAPPQRLSPPKMQKISSTELHVEWS
PPAELNGIIIRYELYMRRLRSTKETTSEESRVFQSSGWLSPHSFVESANENALKPPQTMTTITGLEP
YTKYEFRVLAVNMAGSVSSAWVSERTGESAPVFMIPPSVFPLSSYSLNISWEKPADNVTRGKVV
GYDINMLSEQSPQQSIPMAFSQLLHTAKSQELSYTVEGLKPYRIYEFTITLCNSVGCVTSASGAGQ
TLAAAPAQLRPPLVKGINSTTIHLRWFPPEELNGPSPIYQLERRESSLPALMTTMMKGIRFIGNGY
CKFPSSTHPVNTDFTGIKASFRTKVPEGLIVFAASPGNQEEYFALQLKKGRLYFLFDPQGSPVEVT
TTNDHGKQYSDGKWHEIIAIRHQAFGQITLDGIYTGSSAILNGSTVIGDNTGVFLGGLPRSYTILR
KDPEIIQKGFVGCLKDVHFMKNYNPSAIWEPLDWQSSEEQINVYNSWEGCPASLNEGAQFLGAG
FLELHPYMFHGGMNFEISFKFRTDQLNGLLLFVYNKDGPDFLAMELKSGILTFRLNTSLAFTQVD
LLLGLSYCNGKWNKVIIKKEGSFISASVNGLMKHASESGDQPLVVNSPVYVGGIPQELLNSYQH
LCLEQGFGGCMKDVKFTRGAVVNLASVSSGAVRVNLDGCLSTDSAVNCRGNDSILVYQGKEQS
VYEGGLQPFTEYLYRVIASHEGGSVYSDWSRGRTTGAAPQSVPTPSRVRSLNGYSIEVTWDEPV
VRGVIEKYILKAYSEDSTRPPRMPSASAEFVNTSNLTGILTGLLPFKNYAVTLTACTLAGCTESSH
ALNISTPQEAPQEVQPPVAKSLPSSLLLSWNPPKKANGIITQYCLYMDGRLIYSGSEENYIVTDLA
VFTPHQFLLSACTHVGCTNSSWVLLYTAQLPPEHVDSPVLTVLDSRTIHIQWKQPRKISGILERYV
LYMSNHTHDFTIWSVIYNSTELFQDHMLQYVLPGNKYLIKLGACTGGGCTVSEASEALTDEDIPE
GVPAPKAHSYSPDSFNVSWTEPEYPNGVITSYGLYLDGILIHNSSELSYRAYGFAPWSLHSFRVQ
ACTAKGCALGPLVENRTLEAPPEGTVNVFVKTQGSRKAHVRWEAPFRPNGLLTHSVLFTGIFYV
DPVGNNYTLLNVTKVMYSGEETNLWVLIDGLVPFTNYTVQVNISNSQGSLITDPITIAMPPGAPD
GVLPPRLSSATPTSLQVVWSTPARNNAPGSPRYQLQMRSGDSTHGFLELFSNPSASLSYEVSDLQ
PYTEYMFRLVASNGFGSAHSSWIPFMTAEDKPGPVVPPILLDVKSRMMLVTWQHPRKSNGVITH
YNIYLHGRLYLRTPGNVTNCTVMHLHPYTAYKFQVEACTSKGCSLSPESQTVWTLPGAPEGIPSP
ELFSDTPTSVIISWQPPTHPNGLVENFTIERRVKGKEEVTTLVTLPRSHSMRFIDKTSALSPWTKYE
YRVLMSTLHGGTNSSAWVEVTTRPSRPAGVQPPVVTVLEPDAVQVTWKPPLIQNGDILSYEIHM
PDPHITLTNVTSAVLSQKVTHLIPFTNYSVTIVACSGGNGYLGGCTESLPTYVTTHPTVPQNVGPL
SVIPLSESYVVISWQPPSKPNGPNLRYELLRRKIQQPLASNPPEDLNRWHNIYSGTQWLYEDKGL
SRFTTYEYMLFVHNSVGFTPSREVTVTTLAGLPERGANLTASVLNHTAIDVRWAKPTVQDLQGE
VEYYTLFWSSATSNDSLKILPDVNSHVIGHLKPNTEYWIFISVFNGVHSINSAGLHATTCDGEPQG
MLPPEVVIINSTAVRVIWTSPSNPNGVVTEYSIYVNNKLYKTGMNVPGSFILRDLSPFTIYDIQVE
VCTIYACVKSNGTQITTVEDTPSDIPTPTIRGITSRSLQIDWVSPRKPNGIILGYDLLWKTWYPCAK
TQKLVQDQSDELCKAVRCQKPESICGHICYSSEAKVCCNGVLYNPKPGHRCCEEKYIPFVLNSTG
VCCGGRIQEAQPNHQCCSGYYARILPGEVCCPDEQHNRVSVGIGDSCCGRMPYSTSGNQICCAG
RLHDGHGQKCCGRQIVSNDLECCGGEEGVVYNRLPGMFCCGQDYVNMSDTICCSASSGESKAH
IKKNDPVPVKCCETELIPKSQKCCNGVGYNPLKYVCSDKISTGMMMKETKECRILCPASMEATE
HCGRCDFNFTSHICTVIRGSHNSTGKASIEEMCSSAEETIHTGSVNTYSYTDVNLKPYMTYEYRIS
AWNSYGRGLSKAVRARTKEDVPQGVSPPTWTKIDNLEDTIVLNWRKPIQSNGPIIYYILLRNGIE
RFRGTSLSFSDKEGIQPFQEYSYQLKACTVAGCATSSKVVAATTQGVPESILPPSITALSAVALHL
SWSVPEKSNGVIKEYQIRQVGKGLIHTDTTDRRQHTVTGLQPYTNYSFTLTACTSAGCTSSEPFL
GQTLQAAPEGVWVTPRHIIINSTTVELYWSLPEKPNGLVSQYQLSRNGNLLFLGGSEEQNFTDKN
LEPNSRYTYKLEVKTGGGSSASDDYIVQTPMSTPEEIYPPYNITVIGPYSIFVAWIPPGILIPEIPVEY
NVLLNDGSVTPLAFSVGHHQSTLLENLTPFTQYEIRIQACQNGSCGVSSRMFVKTPEAAPMDLNS
PVLKALGSACIEIKWMPPEKPNGIIINYFIYRRPAGIEEESVLFVWSEGALEFMDEGDTLRPFTLYE
YRVRACNSKGSVESLWSLTQTLEAPPQDFPAPWAQATSAHSVLLNWTKPESPNGIISHYRVVYQ
ERPDDPTFNSPTVHAFTVKGTSHQAHLYGLEPFTTYRIGVVAANHAGEILSPWTLIQTLESSPSGL
RNFIVEQKENGRALLLQWSEPMRTNGVIKTYNIFSDGFLEYSGLNRQFLFRRLDPFTLYTLTLEA
CTRAGCAHSAPQPLWTDEAPPDSQLAPTVHSVKSTSVELSWSEPVNPNGKIIRYEVIRRCFEGKA
WGNQTIQADEKIVFTEYNTERNTFMYNDTGLQPWTQCEYKIYTWNSAGHTCSSWNVVRTLQAP
PEGLSPPVISYVSMNPQKLLISWIPPEQSNGIIQSYRLQRNEMLYPFSFDPVTFNYTDEELLPFSTYS
YALQACTSGGCSTSKPTSITTLEAAPSEVSPPDLWAVSATQMNVCWSPPTVQNGKITKYLVRYD
NKESLAGQGLCLLVSHLQPYSQYNFSLVACTNGGCTASVSKSAWTMEALPENMDSPTLQVTGS
ESIEITWKPPRNPNGQIRSYELRRDGTIVYTGLETRYRDFTLTPGVEYSYTVTASNSQGGILSPLVK
DRTSPSAPSGMEPPKLQARGPQEILVNWDPPVRTNGDIINYTLFIRELFERETKIIHINTTHNSFGM
QSYIVNQLKPFHRYEIRIQACTTLGCASSDWTFIQTPEIAPLMQPPPHLEVQMAPGGFQPTVSLLW
TGPLQPNGKVLYYELYRRQIATQPRKSNPVLIYNGSSTSFIDSELLPFTEYEYQVWAVNSAGKAP
SSWTWCRTGPAPPEGLRAPTFHVISSTQAVVNISAPGKPNGIVSLYRLFSSSAHGAETVLSEGMA
TQQTLHGLQAFTNYSIGVEACTCFNCCSKGPTAELRTHPAPPSGLSSPQIGTLASRTASFRWSPPM
FPNGVIHSYELQFHVACPPDSALPCTPSQIETKYTGLGQKASLGGLQPYTTYKLRVVAHNEVGST
ASEWISFTTQKELPQYRAPFSVDSNLSVVCVNWSDTFLLNGQLKEYVLTDGGRRVYSGLDTTLY
IPRTADKTFFFQVICTTDEGSVKTPLIQYDTSTGLGLVLTTPGKKKGSRSKSTEFYSELWFIVLMA
MLGLILLAIFLSLILQRKIHKEPYIRERPPLVPLQKRMSPLNVYPPGENHMGLADTKIPRSGTPVSI
RSNRSACVLRIPSQNQTSLTYSQGSLHRSVSQLMDIQDKKVLMDNSLWEAIMGHNSGLYVDEED
LMNAIKDFSSVTKERTTFTDTHL.
Wild-type Usherin Protein, isoform A
(SEQ ID NO: 7608)
MNCPVLSLGSGFLFQVIEMLIFAYFASISLTESRGLFPRLENVGAFKKVSIVPTQAVCGL
PDRSTFCHSSAAAESIQFCTQRFCIQDCPYRSSHPTYTALFSAGLSSCITPDKNDLHPNA
HSNSASFIFGNHKSCFSSPPSPKLMASFTLAVWLKPEQQGVMCVIEKTVDGQIVFKLTIS
EKETMFYYRTVNGLQPPIKVMTLGRILVKKWIHLSVQVHQTKISFFINGVEKDHTPFNAR
TLSGSITDFASGTVQIGQSLNGLEQFVGRMQDERLYQVALTNREILEVFSGDLLRLHAQS
HCRCPGSHPRVHPLAQRYCIPNDAGDTADNRVSRLNPEAHPLSFVNDNDVGTSWVSNVFT
NITQLNQGVTISVDLENGQYQVFYIIIQFFSPQPTEIRIQRKKENSLDWEDWQYFARNCG
AFGMKNNGDLEKPDSVNCLQLSNFTPYSRGNVTFSILTPGPNYRPGYNNFYNTPSLQEFV
KATQIRFHFHGQYYTTETAVNLRHRYYAVDEITISGRCQCHGHADNCDTTSQPYRCLCSQ
ESFTEGLHCDRCLPLYNDKPFRQGDQVYAFNCKPCQCNSHSKSCHYNISVDPFPFEHFRG
GGGVCDDCEHNTTGRNCELCKDYFFRQVGADPSAIDVCKPCDCDTVGTRNGSILCDQIGG
QCNCKRHVSGRQCNQCQNGFYNLQELDPDGCSPCNCNTSGTVDGDITCHQNSGQCKCKAN
VIGLRCDHCNFGFKFLRSFNDVGCEPCQCNLHGSVNKFCNPHSGQCECKKEAKGLQCDTC
RENFYGLDVTNCKACDCDTAGSLPGTVCNAKTGQCICKPNVEGRQCNKCLEGNFYLRQNN
SFLCLPCNCDKTGTINGSLLCNKSTGQCPCKLGVTGLRCNQCEPHRYNLTIDNFQHCQMC
ECDSLGTLPGTICDPISGQCLCVPNRQGRRCNQCQPGFYISPGNATGCLPCSCHTTGAVN
HICNSLTGQCVCQDASIAGQRCDQCKDHYFGFDPQTGRCQPCNCHLSGALNETCHLVTGQ
CFCKQFVTGSKCDACVPSASHLDVNNLLGCSKTPFQQPPPRGQVQSSSAINLSWSPPDSP
NAHWLTYSLLRDGFEIYTTEDQYPYSIQYFLDTDLLPYTKYSYYIETTNVHGSTRSVAVT
YKTKPGVPEGNLTLSYIIPIGSDSVTLTWTTLSNQSGPIEKYILSCAPLAGGQPCVSYEG
HETSATIWNLVPFAKYDFSVQACTSGGCLHSLPITVTTAQAPPQRLSPPKMQKISSTELH
VEWSPPAELNGIIIRYELYMRRLRSTKETTSEESRVFQSSGWLSPHSFVESANENALKPP
QTMTTITGLEPYTKYEFRVLAVNMAGSVSSAWVSERTGESAPVFMIPPSVFPLSSYSLNI
SWEKPADNVTRGKVVGYDINMLSEQSPQQSIPMAFSQLLHTAKSQELSYTVEGLKPYRIY
EFTITLCNSVGCVTSASGAGQTLAAAPAQLRPPLVKGINSTTIHLRWFPPEELNGPSPIY
QLERRESSLPALMTTMMKGIRFIGNGYCKFPSSTHPVNTDFTGKCV

Lengthy table referenced here
US20240352453A1-20241024-T00001
Please refer to the end of the specification for access instructions.

Lengthy table referenced here
US20240352453A1-20241024-T00002
Please refer to the end of the specification for access instructions.

Lengthy table referenced here
US20240352453A1-20241024-T00003
Please refer to the end of the specification for access instructions.

Lengthy table referenced here
US20240352453A1-20241024-T00004
Please refer to the end of the specification for access instructions.

Lengthy table referenced here
US20240352453A1-20241024-T00005
Please refer to the end of the specification for access instructions.

Lengthy table referenced here
US20240352453A1-20241024-T00006
Please refer to the end of the specification for access instructions.

Lengthy table referenced here
US20240352453A1-20241024-T00007
Please refer to the end of the specification for access instructions.

Lengthy table referenced here
US20240352453A1-20241024-T00008
Please refer to the end of the specification for access instructions.

Lengthy table referenced here
US20240352453A1-20241024-T00009
Please refer to the end of the specification for access instructions.

Lengthy table referenced here
US20240352453A1-20241024-T00010
Please refer to the end of the specification for access instructions.

Lengthy table referenced here
US20240352453A1-20241024-T00011
Please refer to the end of the specification for access instructions.

Lengthy table referenced here
US20240352453A1-20241024-T00012
Please refer to the end of the specification for access instructions.

Lengthy table referenced here
US20240352453A1-20241024-T00013
Please refer to the end of the specification for access instructions.

Lengthy table referenced here
US20240352453A1-20241024-T00014
Please refer to the end of the specification for access instructions.

Lengthy table referenced here
US20240352453A1-20241024-T00015
Please refer to the end of the specification for access instructions.

Lengthy table referenced here
US20240352453A1-20241024-T00016
Please refer to the end of the specification for access instructions.

Lengthy table referenced here
US20240352453A1-20241024-T00017
Please refer to the end of the specification for access instructions.

Lengthy table referenced here
US20240352453A1-20241024-T00018
Please refer to the end of the specification for access instructions.

Lengthy table referenced here
US20240352453A1-20241024-T00019
Please refer to the end of the specification for access instructions.

Lengthy table referenced here
US20240352453A1-20241024-T00020
Please refer to the end of the specification for access instructions.

Lengthy table referenced here
US20240352453A1-20241024-T00021
Please refer to the end of the specification for access instructions.

Lengthy table referenced here
US20240352453A1-20241024-T00022
Please refer to the end of the specification for access instructions.

Lengthy table referenced here
US20240352453A1-20241024-T00023
Please refer to the end of the specification for access instructions.

Lengthy table referenced here
US20240352453A1-20241024-T00024
Please refer to the end of the specification for access instructions.

Lengthy table referenced here
US20240352453A1-20241024-T00025
Please refer to the end of the specification for access instructions.

Lengthy table referenced here
US20240352453A1-20241024-T00026
Please refer to the end of the specification for access instructions.

Lengthy table referenced here
US20240352453A1-20241024-T00027
Please refer to the end of the specification for access instructions.

Lengthy table referenced here
US20240352453A1-20241024-T00028
Please refer to the end of the specification for access instructions.

Lengthy table referenced here
US20240352453A1-20241024-T00029
Please refer to the end of the specification for access instructions.

Lengthy table referenced here
US20240352453A1-20241024-T00030
Please refer to the end of the specification for access instructions.

Lengthy table referenced here
US20240352453A1-20241024-T00031
Please refer to the end of the specification for access instructions.

Lengthy table referenced here
US20240352453A1-20241024-T00032
Please refer to the end of the specification for access instructions.

Lengthy table referenced here
US20240352453A1-20241024-T00033
Please refer to the end of the specification for access instructions.

Lengthy table referenced here
US20240352453A1-20241024-T00034
Please refer to the end of the specification for access instructions.

Lengthy table referenced here
US20240352453A1-20241024-T00035
Please refer to the end of the specification for access instructions.

Lengthy table referenced here
US20240352453A1-20241024-T00036
Please refer to the end of the specification for access instructions.

Lengthy table referenced here
US20240352453A1-20241024-T00037
Please refer to the end of the specification for access instructions.

Lengthy table referenced here
US20240352453A1-20241024-T00038
Please refer to the end of the specification for access instructions.

Lengthy table referenced here
US20240352453A1-20241024-T00039
Please refer to the end of the specification for access instructions.

Lengthy table referenced here
US20240352453A1-20241024-T00040
Please refer to the end of the specification for access instructions.

Lengthy table referenced here
US20240352453A1-20241024-T00041
Please refer to the end of the specification for access instructions.

Lengthy table referenced here
US20240352453A1-20241024-T00042
Please refer to the end of the specification for access instructions.

Lengthy table referenced here
US20240352453A1-20241024-T00043
Please refer to the end of the specification for access instructions.

Lengthy table referenced here
US20240352453A1-20241024-T00044
Please refer to the end of the specification for access instructions.

LENGTHY TABLES
The patent application contains a lengthy table section. A copy of the table is available in electronic form from the USPTO web site (https://seqdata.uspto.gov/?pageRequest=docDetail&DocID=US20240352453A1). An electronic copy of the table will also be available from the USPTO upon request and payment of the fee set forth in 37 CFR 1.19(b)(3).

1-98. (canceled)

99. A prime editing guide RNA (PEgRNA), or a nucleic acid encoding the PEgRNA, wherein the PEgRNA comprises:
i) a spacer comprising at its 3′ end SEQ ID NO: 602⁷,
ii) a gRNA core capable of binding to a Cas9 protein, and
iii) an extension arm comprising:
i) an editing template comprising at its 3′ end any one of SEQ ID NOs: 6032, 6033, 6038, or 6041, and
ii) a primer binding site (PBS) comprising at its 5′ end a sequence that is a reverse complement of nucleotides 11-14 of SEQ ID NO: 6027.

100. The PEgRNA of claim 99, wherein the spacer comprises at its 3′ end any one of SEQ ID NOs: 6028, 6029, 33, 6030, or 6031.

101. The PEgRNA of claim 100, wherein the spacer comprises at its 3′ end SEQ ID NO: 33.

102. The PEgRNA of claim 99, wherein the editing template comprises at its 3′ end any one of SEQ ID NOs: 6033, 6035, 6037, 6038, 6040, 6041, 6042, 6044, 6045, 6046, 6048, 6049, 6050, 6052, 6053, 6054, 6056, 6057, 6058, 6060, 6061, 6062, 6064, 6065, 6066, 6068, 6069, 6070, 6072, 6073, 6074, 6076, 6077, 6078, 6080, 6081, 6082, 6084, 6085, 6086, 6088, 6089, 6090, 6092, 6093, 6094, 6096, 6097, 6098, 6100, 6101, 6102, 6104, 6105, 6106, 6108, 6109, 6110, 6112, 6113, 6114, 6116, 6117, 6118, 6120, 6121, 6122, 6124, 6125, 6126, 6128, 6129, 6130, 6132, or 6133, and wherein the editing template encodes a PAM silencing mutation.

103. The PEgRNA of claim 102, wherein the editing temple comprises at its 3′ end any one of SEQ ID NOs: 6038, and wherein the editing template encodes a GGG-to-GCT PAM silencing edit.

104. The PEgRNA of claim 102, wherein the editing template comprises at its 3′ end SEQ ID NOs: 6033, and wherein the editing template encodes a GGG-to-GGC PAM silencing edit.

105. The PEgRNA of claim 102, wherein the editing template comprises at its 3′ end SEQ ID NO: 6041, and wherein the editing template encodes a GGG-to-GGA PAM silencing edit.

106. The PEgRNA of claim 99, wherein the editing template comprises at its 3′ end SEQ ID NO: 6032.

107. The PEgRNA of claim 99, wherein the editing template has a length of 22 nucleotides or less.

108. The PEgRNA of claim 99, wherein the PBS comprises a sequence of any one of sequence numbers: 6013, 6014, 6015, 6016, 6017, or SEQ ID NOs: 6018, 6019, 6020, 6021, 6022, 324, 6023, 6024, 6025, or 6026.

109. The PEgRNA of claim 108, wherein the PBS comprises a sequence of any one of SEQ ID NOs: 6020, 6021, or 6022.

110. The PEgRNA of claim 99, wherein the PBS is I1 to 14 nucleotides in length.

111. The PEgRNA of claim 99, wherein the spacer comprises at its 3′ end SEQ ID NO: 33, the editing template comprises at its 3′ end SEQ ID NO: 6042, and the PBS comprises at its 5′ end SEQ ID NO: 6020.

112. The PEgRNA of claim 99, wherein the spacer comprises at its 3′ end SEQ ID NO: 33, the editing template comprises at its 3′ end SEQ ID NO: 6052, and the PBS comprises at its 5′ end SEQ ID NO: 6020.

113. The PEgRNA of claim 99, wherein the spacer comprises at its 3′ end SEQ ID NO: 33, the editing template comprises at its 3′ end SEQ ID NO: 6053, and the PBS comprises at its 5′ end SEQ ID NO: 6020.

114. A prime editing system comprising
a) a prime editing guide RNA (PEgRNA) or a nucleic acid encoding the PEgRNA, wherein the PEgRNA comprises:
i) a spacer comprising at its 3′ end SEQ ID NO: 6027,
ii) a gRNA core capable of binding to a Cas9 protein, and
iii) an extension arm comprising:
i) an editing template comprising at its 3′ end any one of SEQ ID NOs: 6032, 6033, 6038, or 6041, and
ii) a primer binding site (PBS) comprising at its 5′ end a sequence that is a reverse complement of nucleotides 11-14 of SEQ ID NO: 6027; and
b) a nick guide RNA (ngRNA) or nucleic acid encoding the ngRNA, wherein the ngRNA comprises:
i) a ngRNA spacer comprising at its 3′ end a sequence corresponding to nucleotides 4-20 of any one of SEQ ID NOs: 4, 5971, 4510, 6136, 2008, 6137, 6138, 5972, 4634, 4635, 1676, 646, 4639, 3564, 5973, 1736, 4640, 2090, 380, 1098, 1324, or 5975, and
ii) a ngRNA core capable of binding a Cas9 protein.

115. The prime editing system of claim 114, wherein the ngRNA spacer comprises at its 3′end a sequence of any one of SEQ ID NOs: 5971, 6137, 2008, 3564, or 4635.

116. A method of editing an USH2a gene, the method comprising contacting the USH2a gene with:
a) a prime editing guide RNA (PEgRNA) comprising:
i) a spacer comprising at its 3′ end SEQ ID NO: 6027,
ii) a gRNA core capable of binding to a Cas9 protein, and
iii) an extension arm comprising:
a) an editing template comprising at its 3′ end any one of SEQ ID NOs: 6032, 6033, 6038, or 6041, and
b) a primer binding site (PBS) comprising at its 5′ end a sequence that is a reverse complement of nucleotides 11-14 of SEQ ID NO: 6027; and
b) a prime editor comprising the Cas9 protein and a reverse transcriptase.

117. The method of claim 116, further comprising contacting the USH2a gene with a nick guide RNA (ngRNA) comprising:
i) a ngRNA spacer comprising at its 3′ end a sequence corresponding to nucleotides 4-20 of any one of SEQ ID NOs: 4, 5971, 4510, 6136, 2008, 6137, 6138, 5972, 4634, 4635, 1676, 646, 4639, 3564, 5973, 1736, 4640, 2090, 380, 1098, 1324, or 5975, and
ii) a ngRNA core capable of binding the Cas9 protein.

118. The method of claim 116, wherein the USH2a gene is in a cell.

The application's sequence listing, which the Patent Office published only in electronic form, follows.

SEQUENCE LISTING (7625 sequences)

SEQ ID NO: 1 - RNA, 17 nt, synthetic construct
  source 1..17: mol_type = other RNA; note = PEgRNA spacer (TG PAM)
tcctttggcttcttttt

SEQ ID NO: 2 - RNA, 18 nt, synthetic construct
  source 1..18: mol_type = other RNA; note = PEgRNA spacer (TG PAM)
gtcctttggcttcttttt

SEQ ID NO: 3 - RNA, 19 nt, synthetic construct
  source 1..19: mol_type = other RNA; note = PEgRNA spacer (TG PAM)
agtcctttggcttcttttt

SEQ ID NO: 4 - RNA, 20 nt, synthetic construct
  source 1..20: mol_type = other RNA; note = PEgRNA spacer (TG PAM)
aagtcctttggcttcttttt

SEQ ID NO: 5 - RNA, 21 nt, synthetic construct
  source 1..21: mol_type = other RNA; note = PEgRNA spacer (TG PAM)
gaagtcctttggcttcttttt

SEQ ID NO: 6 - RNA, 22 nt, synthetic construct
  source 1..22: mol_type = other RNA; note = PEgRNA spacer (TG PAM)
tgaagtcctttggcttcttttt

SEQ ID NO: 7-11 - skipped (5 entries)

SEQ ID NO: 12 - RNA, 10 nt, synthetic construct
  source 1..10: mol_type = other RNA; note = PBS
aagaagccaa

SEQ ID NO: 13 - RNA, 11 nt, synthetic construct
  source 1..11: mol_type = other RNA; note = PBS
aagaagccaaa

SEQ ID NO: 14 - RNA, 12 nt, synthetic construct
  source 1..12: mol_type = other RNA; note = PBS
aagaagccaaag

SEQ ID NO: 15 - RNA, 13 nt, synthetic construct
  source 1..13: mol_type = other RNA; note = PBS
aagaagccaaagg

SEQ ID NO: 16 - RNA, 14 nt, synthetic construct
  source 1..14: mol_type = other RNA; note = PBS
aagaagccaaagga

SEQ ID NO: 17 - RNA, 15 nt, synthetic construct
  source 1..15: mol_type = other RNA; note = PBS
aagaagccaaaggac

SEQ ID NO: 18 - RNA, 16 nt, synthetic construct
  source 1..16: mol_type = other RNA; note = PBS
aagaagccaaaggact

SEQ ID NO: 19 - RNA, 17 nt, synthetic construct
  source 1..17: mol_type = other RNA; note = PBS
aagaagccaaaggactt

SEQ ID NO: 20 - RNA, 18 nt, synthetic construct
  source 1..18: mol_type = other RNA; note = PBS
aagaagccaaaggacttc

SEQ ID NO: 21 - RNA, 19 nt, synthetic construct
  source 1..19: mol_type = other RNA; note = PBS
aagaagccaaaggacttca

SEQ ID NO: 22 - RNA, 37 nt, synthetic construct
  source 1..37: mol_type = other RNA; note = RTT*1,2,4 (dual correction)
ttctgcaatcctcactctgggcagtgtgagtgcaaaa

SEQ ID NO: 23 - RNA, 37 nt, synthetic construct
  source 1..37: mol_type = other RNA; note = RTT*1,3,4 (dual correction; TG-to-TA PAM silencing edit)
ttctgcaatcctcactctgggcagtgtgagtgtaaaa

SEQ ID NO: 24 - RNA, 38 nt, synthetic construct
  source 1..38: mol_type = other RNA; note = RTT*1,2,4 (dual correction)
attctgcaatcctcactctgggcagtgtgagtgcaaaa

SEQ ID NO: 25 - RNA, 38 nt, synthetic construct
  source 1..38: mol_type = other RNA; note = RTT*1,3,4 (dual correction; TG-to-TA PAM silencing edit)
attctgcaatcctcactctgggcagtgtgagtgtaaaa

SEQ ID NO: 26 - RNA, 39 nt, synthetic construct
  source 1..39: mol_type = other RNA; note = RTT*1,2,4 (dual correction)
aattctgcaatcctcactctgggcagtgtgagtgcaaaa

SEQ ID NO: 27 - RNA, 39 nt, synthetic construct
  source 1..39: mol_type = other RNA; note = RTT*1,3,4 (dual correction; TG-to-TA PAM silencing edit)
aattctgcaatcctcactctgggcagtgtgagtgtaaaa

SEQ ID NO: 28 - RNA, 40 nt, synthetic construct
  source 1..40: mol_type = other RNA; note = RTT*1,2,4 (dual correction)
aaattctgcaatcctcactctgggcagtgtgagtgcaaaa

SEQ ID NO: 29 - RNA, 40 nt, synthetic construct
  source 1..40: mol_type = other RNA; note = RTT*1,3,4 (dual correction; TG-to-TA PAM silencing edit)
aaattctgcaatcctcactctgggcagtgtgagtgtaaaa

SEQ ID NO: 30 - RNA, 20 nt, synthetic construct
  source 1..20: mol_type = other RNA; note = PE3 ngRNA spacer (TG PAM)
aaattctgcaatcctcactc

SEQ ID NO: 31 - RNA, 20 nt, synthetic construct
  source 1..20: mol_type = other RNA; note = PE3 ngRNA spacer (TG PAM)
aaatttctccgaagctttaa

SEQ ID NO: 32 - RNA, 20 nt, synthetic construct
  source 1..20: mol_type = other RNA; note = PEgRNA spacer (TAG PAM)
aatcctcactctgggcagtg

SEQ ID NO: 33 - RNA, 20 nt, synthetic construct
  source 1..20: mol_type = other RNA; note = PE3 ngRNA spacer (GG PAM)
aattctgcaatcctcactct

SEQ ID NO: 34 - RNA, 20 nt, synthetic construct
  source 1..20: mol_type = other RNA; note = PE3 ngRNA spacer (TG PAM)
agctttaatgatgttggatg

SEQ ID NO: 35 - RNA, 20 nt, synthetic construct
  source 1..20: mol_type = other RNA; note = PE3 ngRNA spacer (TG PAM)
atgatgttggatgtgagccc

SEQ ID NO: 36 - RNA, 20 nt, synthetic construct
  source 1..20: mol_type = other RNA; note = PE3 ngRNA spacer (GG PAM)
attctgcaatcctcactctg

SEQ ID NO: 37 - RNA, 20 nt, synthetic construct
  source 1..20: mol_type = other RNA; note = PE3 ngRNA spacer (AG PAM)
cagtgtaacctccatggctc

SEQ ID NO: 38 - RNA, 20 nt, synthetic construct
  source 1..20: mol_type = other RNA; note = PE3 ngRNA spacer (TG PAM)
ccctgccagtgtaacctcca

SEQ ID NO: 39 - RNA, 20 nt, synthetic construct
  source 1..20: mol_type = other RNA; note = PE3 ngRNA spacer (GG PAM)
cctgccagtgtaacctccat

SEQ ID NO: 40 - RNA, 20 nt, synthetic construct
  source 1..20: mol_type = other RNA; note = PE3b*1 ngRNA spacer (TG PAM)
ctcactctgggcagtgtgag

SEQ ID NO: 41 - RNA, 20 nt, synthetic construct
  source 1..20: mol_type = other RNA; note = PE3 ngRNA spacer (TG PAM)
ctccgaagctttaatgatgt

SEQ ID NO: 42 - RNA, 20 nt, synthetic construct
  source 1..20: mol_type = other RNA; note = PE3 ngRNA spacer (AG PAM)
ctgcaatcctcactctgggc

SEQ ID NO: 43 - RNA, 20 nt, synthetic construct
  source 1..20: mol_type = other RNA; note = PE3 ngRNA spacer (AG PAM)
ctttaatgatgttggatgtg

SEQ ID NO: 44 - RNA, 20 nt, synthetic construct
  source 1..20: mol_type = other RNA; note = PE3 ngRNA spacer (TG PAM)
gaagctttaatgatgttgga

SEQ ID NO: 45 - RNA, 20 nt, synthetic construct
  source 1..20: mol_type = other RNA; note = PE3 ngRNA spacer (TG PAM)
gcaatcctcactctgggcag

SEQ ID NO: 46 - RNA, 20 nt, synthetic construct
  source 1..20: mol_type = other RNA; note = PE3b*2 ngRNA spacer (AG PAM)
gggcagtgtgagtgcaaaaa

SEQ ID NO: 47 - RNA, 20 nt, synthetic construct
  source 1..20: mol_type = other RNA; note = PE3b*3 ngRNA spacer (AG PAM)
gggcagtgtgagtgtaaaaa

SEQ ID NO: 48 - RNA, 20 nt, synthetic construct
  source 1..20: mol_type = other RNA; note = PE3 ngRNA spacer (TG PAM)
gtgtaacctccatggctcag

SEQ ID NO: 49 - RNA, 20 nt, synthetic construct
  source 1..20: mol_type = other RNA; note = PE3 ngRNA spacer (GG PAM)
tccgaagctttaatgatgtt

SEQ ID NO: 50 - RNA, 20 nt, synthetic construct
  source 1..20: mol_type = other RNA; note = PE3b*4 ngRNA spacer (AG PAM)
tcctcactctgggcagtgtg

SEQ ID NO: 51 - RNA, 20 nt, synthetic construct
  source 1..20: mol_type = other RNA; note = PE3 ngRNA spacer (AG PAM)
tgttggatgtgagccctgcc

SEQ ID NO: 52 - RNA, 20 nt, synthetic construct
  source 1..20: mol_type = other RNA; note = PE3 ngRNA spacer (TG PAM)
ttggatgtgagccctgccag

SEQ ID NO: 53 - RNA, 20 nt, synthetic construct
  source 1..20: mol_type = other RNA; note = PE3 ngRNA spacer (AG PAM)
ttggatttaaatttctccga

SEQ ID NO: 54 - RNA, 20 nt, synthetic construct
  source 1..20: mol_type = other RNA; note = PE3 ngRNA spacer (TG PAM)
tttctccgaagctttaatga

SEQ ID NO: 55 - RNA, 17 nt, synthetic construct
  source 1..17: mol_type = other RNA; note = PBS
ctgcccagagtgaggat

SEQ ID NO: 56 - RNA, 18 nt, synthetic construct
  source 1..18: mol_type = other RNA; note = PEgRNA spacer (TG;TGA PAM)
actgcccagagtgaggat

SEQ ID NO: 57 - RNA, 19 nt, synthetic construct
  source 1..19: mol_type = other RNA; note = PBS
cactgcccagagtgaggat

SEQ ID NO: 58 - RNA, 20 nt, synthetic construct
  source 1..20: mol_type = other RNA; note = PE3 ngRNA spacer (TG PAM)
acactgcccagagtgaggat

SEQ ID NO: 59 - RNA, 21 nt, synthetic construct
  source 1..21: mol_type = other RNA; note = PEgRNA spacer (TG;TGA PAM)
cacactgcccagagtgaggat

SEQ ID NO: 60 - RNA, 22 nt, synthetic construct
  source 1..22: mol_type = other RNA; note = PEgRNA spacer (TG;TGA PAM)
tcacactgcccagagtgaggat

SEQ ID NO: 61-65 - skipped (5 entries)

SEQ ID NO: 66 - RNA, 10 nt, synthetic construct
  source 1..10: mol_type = other RNA; note = PBS
ctcactctgg

SEQ ID NO: 67 - RNA, 11 nt, synthetic construct
  source 1..11: mol_type = other RNA; note = PBS
ctcactctggg

SEQ ID NO: 68 - RNA, 12 nt, synthetic construct
  source 1..12: mol_type = other RNA; note = PBS
ctcactctgggc

SEQ ID NO: 69 - RNA, 13 nt, synthetic construct
  source 1..13: mol_type = other RNA; note = PBS
ctcactctgggca

SEQ ID NO: 70 - RNA, 14 nt, synthetic construct
  source 1..14: mol_type = other RNA; note = PBS
ctcactctgggcag

SEQ ID NO: 71 - RNA, 15 nt, synthetic construct
  source 1..15: mol_type = other RNA; note = PBS
ctcactctgggcagt

SEQ ID NO: 72 - RNA, 16 nt, synthetic construct
  source 1..16: mol_type = other RNA; note = PBS
ctcactctgggcagtg

SEQ ID NO: 73 - RNA, 17 nt, synthetic construct
  source 1..17: mol_type = other RNA; note = PEgRNA spacer (AG PAM)
ctcactctgggcagtgt

SEQ ID NO: 74 - RNA, 18 nt, synthetic construct
  source 1..18: mol_type = other RNA; note = PBS
ctcactctgggcagtgtg

SEQ ID NO: 75 - RNA, 19 nt, synthetic construct
  source 1..19: mol_type = other RNA; note = PBS
ctcactctgggcagtgtga

SEQ ID NO: 76 - RNA, 10 nt, synthetic construct
  source 1..10: mol_type = other RNA; note = RTT
ttctgcaatc

SEQ ID NO: 77 - RNA, 10 nt, synthetic construct
  source 1..10: mol_type = other RNA; note = RTT (TG-to-TA PAM silencing edit)
ttctgtaatc

SEQ ID NO: 78 - RNA, 11 nt, synthetic construct
  source 1..11: mol_type = other RNA; note = RTT
attctgcaatc

SEQ ID NO: 79 - RNA, 11 nt, synthetic construct
  source 1..11: mol_type = other RNA; note = RTT (TG-to-TA PAM silencing edit)
attctgtaatc

SEQ ID NO: 80 - RNA, 12 nt, synthetic construct
  source 1..12: mol_type = other RNA; note = RTT
aattctgcaatc

SEQ ID NO: 81 - RNA, 12 nt, synthetic construct
  source 1..12: mol_type = other RNA; note = RTT (TG-to-TA PAM silencing edit)
aattctgtaatc

SEQ ID NO: 82 - RNA, 13 nt, synthetic construct
  source 1..13: mol_type = other RNA; note = RTT
aaattctgcaatc

SEQ ID NO: 83 - RNA, 13 nt, synthetic construct
  source 1..13: mol_type = other RNA; note = RTT (TG-to-TA PAM silencing edit)
aaattctgtaatc

SEQ ID NO: 84 - RNA, 14 nt, synthetic construct
  source 1..14: mol_type = other RNA; note = RTT
caaattctgcaatc

SEQ ID NO: 85 - RNA, 14 nt, synthetic construct
  source 1..14: mol_type = other RNA; note = RTT (TG-to-TA PAM silencing edit)
caaattctgtaatc

SEQ ID NO: 86 - RNA, 15 nt, synthetic construct
  source 1..15: mol_type = other RNA; note = RTT
acaaattctgcaatc

SEQ ID NO: 87 - RNA, 15 nt, synthetic construct
  source 1..15: mol_type = other RNA; note = RTT (TG-to-TA PAM silencing edit)
acaaattctgtaatc

SEQ ID NO: 88 - RNA, 16 nt, synthetic construct
  source 1..16: mol_type = other RNA; note = RTT
aacaaattctgcaatc

SEQ ID NO: 89 - RNA, 16 nt, synthetic construct
  source 1..16: mol_type = other RNA; note = RTT (TG-to-TA PAM silencing edit)
aacaaattctgtaatc

SEQ ID NO: 90 - RNA, 17 nt, synthetic construct
  source 1..17: mol_type = other RNA; note = RTT
gaacaaattctgcaatc

SEQ ID NO: 91 - RNA, 17 nt, synthetic construct
  source 1..17: mol_type = other RNA; note = RTT (TG-to-TA PAM silencing edit)
gaacaaattctgtaatc

SEQ ID NO: 92 - RNA, 18 nt, synthetic construct
  source 1..18: mol_type = other RNA; note = RTT
tgaacaaattctgcaatc

SEQ ID NO: 93 - RNA, 18 nt, synthetic construct
  source 1..18: mol_type = other RNA; note = RTT (TG-to-TA PAM silencing edit)
tgaacaaattctgtaatc

SEQ ID NO: 94 - RNA, 19 nt, synthetic construct
  source 1..19: mol_type = other RNA; note = RTT
gtgaacaaattctgcaatc

SEQ ID NO: 95 - RNA, 19 nt, synthetic construct
  source 1..19: mol_type = other RNA; note = RTT (TG-to-TA PAM silencing edit)
gtgaacaaattctgtaatc

SEQ ID NO: 96 - RNA, 20 nt, synthetic construct
  source 1..20: mol_type = other RNA; note = RTT
agtgaacaaattctgcaatc

SEQ ID NO: 97 - RNA, 20 nt, synthetic construct
  source 1..20: mol_type = other RNA; note = RTT (TG-to-TA PAM silencing edit)
agtgaacaaattctgtaatc

SEQ ID NO: 98 - RNA, 21 nt, synthetic construct
  source 1..21: mol_type = other RNA; note = RTT
cagtgaacaaattctgcaatc

SEQ ID NO: 99 - RNA, 21 nt, synthetic construct
  source 1..21: mol_type = other RNA; note = RTT (TG-to-TA PAM silencing edit)
cagtgaacaaattctgtaatc

SEQ ID NO: 100 - RNA, 22 nt, synthetic construct
  source 1..22: mol_type = other RNA; note = RTT
tcagtgaacaaattctgcaatc

SEQ ID NO: 101 - RNA, 22 nt, synthetic construct
  source 1..22: mol_type = other RNA; note = RTT (TG-to-TA PAM silencing edit)
tcagtgaacaaattctgtaatc

SEQ ID NO: 102 - RNA, 23 nt, synthetic construct
  source 1..23: mol_type = other RNA; note = RTT
ctcagtgaacaaattctgcaatc

SEQ ID NO: 103 - RNA, 23 nt, synthetic construct
  source 1..23: mol_type = other RNA; note = RTT (TG-to-TA PAM silencing edit)
ctcagtgaacaaattctgtaatc

SEQ ID NO: 104 - RNA, 24 nt, synthetic construct
  source 1..24: mol_type = other RNA; note = RTT
gctcagtgaacaaattctgcaatc

SEQ ID NO: 105 - RNA, 24 nt, synthetic construct
  source 1..24: mol_type = other RNA; note = RTT (TG-to-TA PAM silencing edit)
gctcagtgaacaaattctgtaatc

SEQ ID NO: 106 - RNA, 25 nt, synthetic construct
  source 1..25: mol_type = other RNA; note = RTT
ggctcagtgaacaaattctgcaatc

SEQ ID NO: 107 - RNA, 25 nt, synthetic construct
  source 1..25: mol_type = other RNA; note = RTT (TG-to-TA PAM silencing edit)
ggctcagtgaacaaattctgtaatc

SEQ ID NO: 108 - RNA, 26 nt, synthetic construct
  source 1..26: mol_type = other RNA; note = RTT
tggctcagtgaacaaattctgcaatc

SEQ ID NO: 109 - RNA, 26 nt, synthetic construct
  source 1..26: mol_type = other RNA; note = RTT (TG-to-TA PAM silencing edit)
tggctcagtgaacaaattctgtaatc

SEQ ID NO: 110 - RNA, 27 nt, synthetic construct
  source 1..27: mol_type = other RNA; note = RTT
atggctcagtgaacaaattctgcaatc

SEQ ID NO: 111 - RNA, 27 nt, synthetic construct
  source 1..27: mol_type = other RNA; note = RTT (TG-to-TA PAM silencing edit)
atggctcagtgaacaaattctgtaatc

SEQ ID NO: 112 - RNA, 28 nt, synthetic construct
  source 1..28: mol_type = other RNA; note = RTT
catggctcagtgaacaaattctgcaatc

SEQ ID NO: 113 - RNA, 28 nt, synthetic construct
  source 1..28: mol_type = other RNA; note = RTT (TG-to-TA PAM silencing edit)
catggctcagtgaacaaattctgtaatc

SEQ ID NO: 114 - RNA, 29 nt, synthetic construct
  source 1..29: mol_type = other RNA; note = RTT
ccatggctcagtgaacaaattctgcaatc

SEQ ID NO: 115 - RNA, 29 nt, synthetic construct
  source 1..29: mol_type = other RNA; note = RTT (TG-to-TA PAM silencing edit)
ccatggctcagtgaacaaattctgtaatc

SEQ ID NO: 116 - RNA, 30 nt, synthetic construct
  source 1..30: mol_type = other RNA; note = RTT
tccatggctcagtgaacaaattctgcaatc

SEQ ID NO: 117 - RNA, 30 nt, synthetic construct
  source 1..30: mol_type = other RNA; note = RTT (TG-to-TA PAM silencing edit)
tccatggctcagtgaacaaattctgtaatc

SEQ ID NO: 118 - RNA, 31 nt, synthetic construct
  source 1..31: mol_type = other RNA; note = RTT
ctccatggctcagtgaacaaattctgcaatc

SEQ ID NO: 119 - RNA, 31 nt, synthetic construct
  source 1..31: mol_type = other RNA; note = RTT (TG-to-TA PAM silencing edit)
ctccatggctcagtgaacaaattctgtaatc

SEQ ID NO: 120 - RNA, 32 nt, synthetic construct
  source 1..32: mol_type = other RNA; note = RTT
cctccatggctcagtgaacaaattctgcaatc

SEQ ID NO: 121 - RNA, 32 nt, synthetic construct
  source 1..32: mol_type = other RNA; note = RTT (TG-to-TA PAM silencing edit)
cctccatggctcagtgaacaaattctgtaatc

SEQ ID NO: 122 - RNA, 33 nt, synthetic construct
  source 1..33: mol_type = other RNA; note = RTT
acctccatggctcagtgaacaaattctgcaatc

SEQ ID NO: 123 - RNA, 33 nt, synthetic construct
  source 1..33: mol_type = other RNA; note = RTT (TG-to-TA PAM silencing edit)
acctccatggctcagtgaacaaattctgtaatc

SEQ ID NO: 124 - RNA, 34 nt, synthetic construct
  source 1..34: mol_type = other RNA; note = RTT
aacctccatggctcagtgaacaaattctgcaatc

SEQ ID NO: 125 - RNA, 34 nt, synthetic construct
  source 1..34: mol_type = other RNA; note = RTT (TG-to-TA PAM silencing edit)
aacctccatggctcagtgaacaaattctgtaatc

SEQ ID NO: 126 - RNA, 35 nt, synthetic construct
  source 1..35: mol_type = other RNA; note = RTT
taacctccatggctcagtgaacaaattctgcaatc

SEQ ID NO: 127 - RNA, 35 nt, synthetic construct
  source 1..35: mol_type = other RNA; note = RTT (TG-to-TA PAM silencing edit)
taacctccatggctcagtgaacaaattctgtaatc

SEQ ID NO: 128 - RNA, 36 nt, synthetic construct
  source 1..36: mol_type = other RNA; note = RTT
gtaacctccatggctcagtgaacaaattctgcaatc

SEQ ID NO: 129 - RNA, 36 nt, synthetic construct
  source 1..36: mol_type = other RNA; note = RTT (TG-to-TA PAM silencing edit)
gtaacctccatggctcagtgaacaaattctgtaatc

SEQ ID NO: 130 - RNA, 37 nt, synthetic construct
  source 1..37: mol_type = other RNA; note = RTT
tgtaacctccatggctcagtgaacaaattctgcaatc

SEQ ID NO: 131 - RNA, 37 nt, synthetic construct
  source 1..37: mol_type = other RNA; note = RTT (TG-to-TA PAM silencing edit)
tgtaacctccatggctcagtgaacaaattctgtaatc

SEQ ID NO: 132 - RNA, 38 nt, synthetic construct
  source 1..38: mol_type = other RNA; note = RTT
gtgtaacctccatggctcagtgaacaaattctgcaatc

SEQ ID NO: 133 - RNA, 38 nt, synthetic construct
  source 1..38: mol_type = other RNA; note = RTT (TG-to-TA PAM silencing edit)
gtgtaacctccatggctcagtgaacaaattctgtaatc

SEQ ID NO: 134 - RNA, 39 nt, synthetic construct
  source 1..39: mol_type = other RNA; note = RTT
agtgtaacctccatggctcagtgaacaaattctgcaatc

SEQ ID NO: 135 - RNA, 39 nt, synthetic construct
  source 1..39: mol_type = other RNA; note = RTT (TG-to-TA PAM silencing edit)
agtgtaacctccatggctcagtgaacaaattctgtaatc

SEQ ID NO: 136 - RNA, 40 nt, synthetic construct
  source 1..40: mol_type = other RNA; note = RTT
cagtgtaacctccatggctcagtgaacaaattctgcaatc

SEQ ID NO: 137 - RNA, 40 nt, synthetic construct
  source 1..40: mol_type = other RNA; note = RTT (TG-to-TA PAM silencing edit)
cagtgtaacctccatggctcagtgaacaaattctgtaatc

SEQ ID NO: 138 - RNA, 20 nt, synthetic construct
  source 1..20: mol_type = other RNA; note = PE3 ngRNA spacer (TG PAM)
aggtgtgatcattgcaattt

SEQ ID NO: 139 - RNA, 20 nt, synthetic construct
  source 1..20: mol_type = other RNA; note = PE3 ngRNA spacer (CGA;CG PAM)
attttggatttaaatttctc

SEQ ID NO: 140 - RNA, 20 nt, synthetic construct
  source 1..20: mol_type = other RNA; note = PE3 ngRNA spacer (GG;GGA PAM)
ggtgtgatcattgcaatttt

SEQ ID NO: 141 - RNA, 17 nt, synthetic construct
  source 1..17: mol_type = other RNA; note = PEgRNA spacer (AAG;AAGAAT PAM)
gcccagagtgaggattg

SEQ ID NO: 142 - RNA, 18 nt, synthetic construct
  source 1..18: mol_type = other RNA; note = PBS
tgcccagagtgaggattg

SEQ ID NO: 143 - RNA, 19 nt, synthetic construct
  source 1..19: mol_type = other RNA; note = PBS
ctgcccagagtgaggattg

SEQ ID NO: 144 - RNA, 20 nt, synthetic construct
  source 1..20: mol_type = other RNA; note = PE3 ngRNA spacer (CAGAAT PAM)
actgcccagagtgaggattg

SEQ ID NO: 145 - RNA, 21 nt, synthetic construct
  source 1..21: mol_type = other RNA; note = PEgRNA spacer (AAG;AAGAAT PAM)
cactgcccagagtgaggattg

SEQ ID NO: 146 - RNA, 22 nt, synthetic construct
  source 1..22: mol_type = other RNA; note = PEgRNA spacer (AAG;AAGAAT PAM)
acactgcccagagtgaggattg

SEQ ID NO: 147-151 - skipped (5 entries)

SEQ ID NO: 152 - RNA, 10 nt, synthetic construct
  source 1..10: mol_type = other RNA; note = PBS
tcctcactct

SEQ ID NO: 153 - RNA, 11 nt, synthetic construct
  source 1..11: mol_type = other RNA; note = PBS
tcctcactctg

SEQ ID NO: 154 - RNA, 12 nt, synthetic construct
  source 1..12: mol_type = other RNA; note = PBS
tcctcactctgg

SEQ ID NO: 155 - RNA, 13 nt, synthetic construct
  source 1..13: mol_type = other RNA; note = PBS
tcctcactctggg

SEQ ID NO: 156 - RNA, 14 nt, synthetic construct
  source 1..14: mol_type = other RNA; note = PBS
tcctcactctgggc

SEQ ID NO: 157 - RNA, 15 nt, synthetic construct
  source 1..15: mol_type = other RNA; note = PBS
tcctcactctgggca

SEQ ID NO: 158 - RNA, 16 nt, synthetic construct
  source 1..16: mol_type = other RNA; note = PBS
tcctcactctgggcag

SEQ ID NO: 159 - RNA, 17 nt, synthetic construct
  source 1..17: mol_type = other RNA; note = PBS
tcctcactctgggcagt

SEQ ID NO: 160 - RNA, 18 nt, synthetic construct
  source 1..18: mol_type = other RNA; note = PEgRNA spacer (TAG PAM)
tcctcactctgggcagtg

SEQ ID NO: 161 - RNA, 19 nt, synthetic construct
  source 1..19: mol_type = other RNA; note = PEgRNA spacer (AG PAM)
tcctcactctgggcagtgt

SEQ ID NO: 162-163 - skipped (2 entries)

SEQ ID NO: 164 - RNA, 10 nt, synthetic construct
  source 1..10: mol_type = other RNA; note = RTT
aattctgcaa

SEQ ID NO: 165 - RNA, 10 nt, synthetic construct
  source 1..10: mol_type = other RNA; note = RTT (AAG-to-CAA;AAGAAT-to- CAAAAT PAM silencing edit)
aattttgcaa

SEQ ID NO: 166 - RNA, 11 nt, synthetic construct
  source 1..11: mol_type = other RNA; note = RTT
aaattctgcaa

SEQ ID NO: 167 - RNA, 11 nt, synthetic construct
  source 1..11: mol_type = other RNA; note = RTT (AAG-to-CAA;AAGAAT-to- CAAAAT PAM silencing edit)
aaattttgcaa

SEQ ID NO: 168 - RNA, 12 nt, synthetic construct
  source 1..12: mol_type = other RNA; note = RTT
caaattctgcaa

SEQ ID NO: 169 - RNA, 12 nt, synthetic construct
  source 1..12: mol_type = other RNA; note = RTT (AAG-to-CAA;AAGAAT-to- CAAAAT PAM silencing edit)
caaattttgcaa

SEQ ID NO: 170 - RNA, 13 nt, synthetic construct
  source 1..13: mol_type = other RNA; note = RTT
acaaattctgcaa

SEQ ID NO: 171 - RNA, 13 nt, synthetic construct
  source 1..13: mol_type = other RNA; note = RTT (AAG-to-CAA;AAGAAT-to- CAAAAT PAM silencing edit)
acaaattttgcaa

SEQ ID NO: 172 - RNA, 13 nt, synthetic construct
  source 1..13: mol_type = other RNA; note = RTT (AAGAAT-to-CAGAAC PAM silencing edit)
acaagttctgcaa

SEQ ID NO: 173 - RNA, 13 nt, synthetic construct
  source 1..13: mol_type = other RNA; note = RTT (AAGAAT-to-CAAAAC PAM silencing edit)
acaagttttgcaa

SEQ ID NO: 174 - RNA, 14 nt, synthetic construct
  source 1..14: mol_type = other RNA; note = RTT
aacaaattctgcaa

SEQ ID NO: 175 - RNA, 14 nt, synthetic construct
  source 1..14: mol_type = other RNA; note = RTT (AAG-to-CAA;AAGAAT-to- CAAAAT PAM silencing edit)
aacaaattttgcaa

SEQ ID NO: 176 - RNA, 14 nt, synthetic construct
  source 1..14: mol_type = other RNA; note = RTT (AAGAAT-to-CAGAAC PAM silencing edit)
aacaagttctgcaa

SEQ ID NO: 177 - RNA, 14 nt, synthetic construct
  source 1..14: mol_type = other RNA; note = RTT (AAGAAT-to-CAAAAC PAM silencing edit)
aacaagttttgcaa

SEQ ID NO: 178 - RNA, 15 nt, synthetic construct
  source 1..15: mol_type = other RNA; note = RTT
gaacaaattctgcaa

SEQ ID NO: 179 - RNA, 15 nt, synthetic construct
  source 1..15: mol_type = other RNA; note = RTT (AAG-to-CAA;AAGAAT-to- CAAAAT PAM silencing edit)
gaacaaattttgcaa

SEQ ID NO: 180 - RNA, 15 nt, synthetic construct
  source 1..15: mol_type = other RNA; note = RTT (AAGAAT-to-CAGAAC PAM silencing edit)
gaacaagttctgcaa

SEQ ID NO: 181 - RNA, 15 nt, synthetic construct
  source 1..15: mol_type = other RNA; note = RTT (AAGAAT-to-CAAAAC PAM silencing edit)
gaacaagttttgcaa

SEQ ID NO: 182 - RNA, 16 nt, synthetic construct
  source 1..16: mol_type = other RNA; note = RTT
tgaacaaattctgcaa

SEQ ID NO: 183 - RNA, 16 nt, synthetic construct
  source 1..16: mol_type = other RNA; note = RTT (AAG-to-CAA;AAGAAT-to- CAAAAT PAM silencing edit)
tgaacaaattttgcaa

SEQ ID NO: 184 - RNA, 16 nt, synthetic construct
  source 1..16: mol_type = other RNA; note = RTT (AAGAAT-to-CAGAAC PAM silencing edit)
tgaacaagttctgcaa

SEQ ID NO: 185 - RNA, 16 nt, synthetic construct
  source 1..16: mol_type = other RNA; note = RTT (AAGAAT-to-CAAAAC PAM silencing edit)
tgaacaagttttgcaa

SEQ ID NO: 186 - RNA, 17 nt, synthetic construct
  source 1..17: mol_type = other RNA; note = RTT
gtgaacaaattctgcaa

SEQ ID NO: 187 - RNA, 17 nt, synthetic construct
  source 1..17: mol_type = other RNA; note = RTT (AAG-to-CAA;AAGAAT-to- CAAAAT PAM silencing edit)
gtgaacaaattttgcaa

SEQ ID NO: 188 - RNA, 17 nt, synthetic construct
  source 1..17: mol_type = other RNA; note = RTT (AAGAAT-to-CAGAAC PAM silencing edit)
gtgaacaagttctgcaa

SEQ ID NO: 189 - RNA, 17 nt, synthetic construct
  source 1..17: mol_type = other RNA; note = RTT (AAGAAT-to-CAAAAC PAM silencing edit)
gtgaacaagttttgcaa

SEQ ID NO: 190 - RNA, 18 nt, synthetic construct
  source 1..18: mol_type = other RNA; note = RTT
agtgaacaaattctgcaa

SEQ ID NO: 191 - RNA, 18 nt, synthetic construct
  source 1..18: mol_type = other RNA; note = RTT (AAG-to-CAA;AAGAAT-to- CAAAAT PAM silencing edit)
agtgaacaaattttgcaa

SEQ ID NO: 192 - RNA, 18 nt, synthetic construct
  source 1..18: mol_type = other RNA; note = RTT (AAGAAT-to-CAGAAC PAM silencing edit)
agtgaacaagttctgcaa

SEQ ID NO: 193 - RNA, 18 nt, synthetic construct
  source 1..18: mol_type = other RNA; note = RTT (AAGAAT-to-CAAAAC PAM silencing edit)
agtgaacaagttttgcaa

SEQ ID NO: 194 - RNA, 19 nt, synthetic construct
  source 1..19: mol_type = other RNA; note = RTT
cagtgaacaaattctgcaa

SEQ ID NO: 195 - RNA, 19 nt, synthetic construct
  source 1..19: mol_type = other RNA; note = RTT (AAG-to-CAA;AAGAAT-to- CAAAAT PAM silencing edit)
cagtgaacaaattttgcaa

SEQ ID NO: 196 - RNA, 19 nt, synthetic construct
  source 1..19: mol_type = other RNA; note = RTT (AAGAAT-to-CAGAAC PAM silencing edit)
cagtgaacaagttctgcaa

SEQ ID NO: 197 - RNA, 19 nt, synthetic construct
  source 1..19: mol_type = other RNA; note = RTT (AAGAAT-to-CAAAAC PAM silencing edit)
cagtgaacaagttttgcaa

SEQ ID NO: 198 - RNA, 20 nt, synthetic construct
  source 1..20: mol_type = other RNA; note = RTT
tcagtgaacaaattctgcaa

SEQ ID NO: 199 - RNA, 20 nt, synthetic construct
  source 1..20: mol_type = other RNA; note = RTT (AAG-to-CAA;AAGAAT-to- CAAAAT PAM silencing edit)
tcagtgaacaaattttgcaa

SEQ ID NO: 200 - RNA, 20 nt, synthetic construct
  source 1..20: mol_type = other RNA; note = RTT (AAGAAT-to-CAGAAC PAM silencing edit)
tcagtgaacaagttctgcaa

SEQ ID NO: 201 - RNA, 20 nt, synthetic construct
  source 1..20: mol_type = other RNA; note = RTT (AAGAAT-to-CAAAAC PAM silencing edit)
tcagtgaacaagttttgcaa

SEQ ID NO: 202 - RNA, 21 nt, synthetic construct
  source 1..21: mol_type = other RNA; note = RTT
ctcagtgaacaaattctgcaa

SEQ ID NO: 203 - RNA, 21 nt, synthetic construct
  source 1..21: mol_type = other RNA; note = RTT (AAG-to-CAA;AAGAAT-to- CAAAAT PAM silencing edit)
ctcagtgaacaaattttgcaa

SEQ ID NO: 204 - RNA, 21 nt, synthetic construct
  source 1..21: mol_type = other RNA; note = RTT (AAGAAT-to-CAGAAC PAM silencing edit)
ctcagtgaacaagttctgcaa

SEQ ID NO: 205 - RNA, 21 nt, synthetic construct
  source 1..21: mol_type = other RNA; note = RTT (AAGAAT-to-CAAAAC PAM silencing edit)
ctcagtgaacaagttttgcaa

SEQ ID NO: 206 - RNA, 22 nt, synthetic construct
  source 1..22: mol_type = other RNA; note = RTT
gctcagtgaacaaattctgcaa

SEQ ID NO: 207 - RNA, 22 nt, synthetic construct
  source 1..22: mol_type = other RNA; note = RTT (AAG-to-CAA;AAGAAT-to- CAAAAT PAM silencing edit)
gctcagtgaacaaattttgcaa

SEQ ID NO: 208 - RNA, 22 nt, synthetic construct
  source 1..22: mol_type = other RNA; note = RTT (AAGAAT-to-CAGAAC PAM silencing edit)
gctcagtgaacaagttctgcaa

SEQ ID NO: 209 - RNA, 22 nt, synthetic construct
  source 1..22: mol_type = other RNA; note = RTT (AAGAAT-to-CAAAAC PAM silencing edit)
gctcagtgaacaagttttgcaa

SEQ ID NO: 210 - RNA, 23 nt, synthetic construct
  source 1..23: mol_type = other RNA; note = RTT
ggctcagtgaacaaattctgcaa

SEQ ID NO: 211 - RNA, 23 nt, synthetic construct
  source 1..23: mol_type = other RNA; note = RTT (AAG-to-CAA;AAGAAT-to- CAAAAT PAM silencing edit)
ggctcagtgaacaaattttgcaa

SEQ ID NO: 212 - RNA, 23 nt, synthetic construct
  source 1..23: mol_type = other RNA; note = RTT (AAGAAT-to-CAGAAC PAM silencing edit)
ggctcagtgaacaagttctgcaa

SEQ ID NO: 213 - RNA, 23 nt, synthetic construct
  source 1..23: mol_type = other RNA; note = RTT (AAGAAT-to-CAAAAC PAM silencing edit)
ggctcagtgaacaagttttgcaa

SEQ ID NO: 214 - RNA, 24 nt, synthetic construct
  source 1..24: mol_type = other RNA; note = RTT
tggctcagtgaacaaattctgcaa

SEQ ID NO: 215 - RNA, 24 nt, synthetic construct
  source 1..24: mol_type = other RNA; note = RTT (AAG-to-CAA;AAGAAT-to- CAAAAT PAM silencing edit)
tggctcagtgaacaaattttgcaa

SEQ ID NO: 216 - RNA, 24 nt, synthetic construct
  source 1..24: mol_type = other RNA; note = RTT (AAGAAT-to-CAGAAC PAM silencing edit)
tggctcagtgaacaagttctgcaa

SEQ ID NO: 217 - RNA, 24 nt, synthetic construct
  source 1..24: mol_type = other RNA; note = RTT (AAGAAT-to-CAAAAC PAM silencing edit)
tggctcagtgaacaagttttgcaa

SEQ ID NO: 218 - RNA, 25 nt, synthetic construct
  source 1..25: mol_type = other RNA; note = RTT
atggctcagtgaacaaattctgcaa

SEQ ID NO: 219 - RNA, 25 nt, synthetic construct
  source 1..25: mol_type = other RNA; note = RTT (AAG-to-CAA;AAGAAT-to- CAAAAT PAM silencing edit)
atggctcagtgaacaaattttgcaa

SEQ ID NO: 220 - RNA, 25 nt, synthetic construct
  source 1..25: mol_type = other RNA; note = RTT (AAGAAT-to-CAGAAC PAM silencing edit)
atggctcagtgaacaagttctgcaa

SEQ ID NO: 221 - RNA, 25 nt, synthetic construct
  source 1..25: mol_type = other RNA; note = RTT (AAGAAT-to-CAAAAC PAM silencing edit)
atggctcagtgaacaagttttgcaa

SEQ ID NO: 222 - RNA, 26 nt, synthetic construct
  source 1..26: mol_type = other RNA; note = RTT
catggctcagtgaacaaattctgcaa

SEQ ID NO: 223 - RNA, 26 nt, synthetic construct
  source 1..26: mol_type = other RNA; note = RTT (AAG-to-CAA;AAGAAT-to- CAAAAT PAM silencing edit)
catggctcagtgaacaaattttgcaa

SEQ ID NO: 224 - RNA, 26 nt, synthetic construct
  source 1..26: mol_type = other RNA; note = RTT (AAGAAT-to-CAGAAC PAM silencing edit)
catggctcagtgaacaagttctgcaa

SEQ ID NO: 225 - RNA, 26 nt, synthetic construct
  source 1..26: mol_type = other RNA; note = RTT (AAGAAT-to-CAAAAC PAM silencing edit)
catggctcagtgaacaagttttgcaa

SEQ ID NO: 226 - RNA, 27 nt, synthetic construct
  source 1..27: mol_type = other RNA; note = RTT
ccatggctcagtgaacaaattctgcaa

SEQ ID NO: 227 - RNA, 27 nt, synthetic construct
  source 1..27: mol_type = other RNA; note = RTT (AAG-to-CAA;AAGAAT-to- CAAAAT PAM silencing edit)
ccatggctcagtgaacaaattttgcaa

SEQ ID NO: 228 - RNA, 27 nt, synthetic construct
  source 1..27: mol_type = other RNA; note = RTT (AAGAAT-to-CAGAAC PAM silencing edit)
ccatggctcagtgaacaagttctgcaa

SEQ ID NO: 229 - RNA, 27 nt, synthetic construct
  source 1..27: mol_type = other RNA; note = RTT (AAGAAT-to-CAAAAC PAM silencing edit)
ccatggctcagtgaacaagttttgcaa

SEQ ID NO: 230 - RNA, 28 nt, synthetic construct
  source 1..28: mol_type = other RNA; note = RTT
tccatggctcagtgaacaaattctgcaa

SEQ ID NO: 231 - RNA, 28 nt, synthetic construct
  source 1..28: mol_type = other RNA; note = RTT (AAG-to-CAA;AAGAAT-to- CAAAAT PAM silencing edit)
tccatggctcagtgaacaaattttgcaa

SEQ ID NO: 232 - RNA, 28 nt, synthetic construct
  source 1..28: mol_type = other RNA; note = RTT (AAGAAT-to-CAGAAC PAM silencing edit)
tccatggctcagtgaacaagttctgcaa

SEQ ID NO: 233 - RNA, 28 nt, synthetic construct
  source 1..28: mol_type = other RNA; note = RTT (AAGAAT-to-CAAAAC PAM silencing edit)
tccatggctcagtgaacaagttttgcaa

SEQ ID NO: 234 - RNA, 29 nt, synthetic construct
  source 1..29: mol_type = other RNA; note = RTT
ctccatggctcagtgaacaaattctgcaa

SEQ ID NO: 235 - RNA, 29 nt, synthetic construct
  source 1..29: mol_type = other RNA; note = RTT (AAG-to-CAA;AAGAAT-to- CAAAAT PAM silencing edit)
ctccatggctcagtgaacaaattttgcaa

SEQ ID NO: 236 - RNA, 29 nt, synthetic construct
  source 1..29: mol_type = other RNA; note = RTT (AAGAAT-to-CAGAAC PAM silencing edit)
ctccatggctcagtgaacaagttctgcaa

SEQ ID NO: 237 - RNA, 29 nt, synthetic construct
  source 1..29: mol_type = other RNA; note = RTT (AAGAAT-to-CAAAAC PAM silencing edit)
ctccatggctcagtgaacaagttttgcaa

SEQ ID NO: 238 - RNA, 30 nt, synthetic construct
  source 1..30: mol_type = other RNA; note = RTT
cctccatggctcagtgaacaaattctgcaa

SEQ ID NO: 239 - RNA, 30 nt, synthetic construct
  source 1..30: mol_type = other RNA; note = RTT (AAG-to-CAA;AAGAAT-to- CAAAAT PAM silencing edit)
cctccatggctcagtgaacaaattttgcaa

SEQ ID NO: 240 - RNA, 30 nt, synthetic construct
  source 1..30: mol_type = other RNA; note = RTT (AAGAAT-to-CAGAAC PAM silencing edit)
cctccatggctcagtgaacaagttctgcaa

SEQ ID NO: 241 - RNA, 30 nt, synthetic construct
  source 1..30: mol_type = other RNA; note = RTT (AAGAAT-to-CAAAAC PAM silencing edit)
cctccatggctcagtgaacaagttttgcaa

SEQ ID NO: 242 - RNA, 31 nt, synthetic construct
  source 1..31: mol_type = other RNA; note = RTT
acctccatggctcagtgaacaaattctgcaa

SEQ ID NO: 243 - RNA, 31 nt, synthetic construct
  source 1..31: mol_type = other RNA; note = RTT (AAG-to-CAA;AAGAAT-to- CAAAAT PAM silencing edit)
acctccatggctcagtgaacaaattttgcaa

SEQ ID NO: 244 - RNA, 31 nt, synthetic construct
  source 1..31: mol_type = other RNA; note = RTT (AAGAAT-to-CAGAAC PAM silencing edit)
acctccatggctcagtgaacaagttctgcaa

SEQ ID NO: 245 - RNA, 31 nt, synthetic construct
  source 1..31: mol_type = other RNA; note = RTT (AAGAAT-to-CAAAAC PAM silencing edit)
acctccatggctcagtgaacaagttttgcaa

SEQ ID NO: 246 - RNA, 32 nt, synthetic construct
  source 1..32: mol_type = other RNA; note = RTT
aacctccatggctcagtgaacaaattctgcaa

SEQ ID NO: 247 - RNA, 32 nt, synthetic construct
  source 1..32: mol_type = other RNA; note = RTT (AAG-to-CAA;AAGAAT-to- CAAAAT PAM silencing edit)
aacctccatggctcagtgaacaaattttgcaa

SEQ ID NO: 248 - RNA, 32 nt, synthetic construct
  source 1..32: mol_type = other RNA; note = RTT (AAGAAT-to-CAGAAC PAM silencing edit)
aacctccatggctcagtgaacaagttctgcaa

SEQ ID NO: 249 - RNA, 32 nt, synthetic construct
  source 1..32: mol_type = other RNA; note = RTT (AAGAAT-to-CAAAAC PAM silencing edit)
aacctccatggctcagtgaacaagttttgcaa

SEQ ID NO: 250 - RNA, 33 nt, synthetic construct
  source 1..33: mol_type = other RNA; note = RTT
taacctccatggctcagtgaacaaattctgcaa

SEQ ID NO: 251 - RNA, 33 nt, synthetic construct
  source 1..33: mol_type = other RNA; note = RTT (AAG-to-CAA;AAGAAT-to- CAAAAT PAM silencing edit)
taacctccatggctcagtgaacaaattttgcaa

SEQ ID NO: 252 - RNA, 33 nt, synthetic construct
  source 1..33: mol_type = other RNA; note = RTT (AAGAAT-to-CAGAAC PAM silencing edit)
taacctccatggctcagtgaacaagttctgcaa

SEQ ID NO: 253 - RNA, 33 nt, synthetic construct
  source 1..33: mol_type = other RNA; note = RTT (AAGAAT-to-CAAAAC PAM silencing edit)
taacctccatggctcagtgaacaagttttgcaa

SEQ ID NO: 254 - RNA, 34 nt, synthetic construct
  source 1..34: mol_type = other RNA; note = RTT
gtaacctccatggctcagtgaacaaattctgcaa

SEQ ID NO: 255 - RNA, 34 nt, synthetic construct
  source 1..34: mol_type = other RNA; note = RTT (AAG-to-CAA;AAGAAT-to- CAAAAT PAM silencing edit)
gtaacctccatggctcagtgaacaaattttgcaa

SEQ ID NO: 256 - RNA, 34 nt, synthetic construct
  source 1..34: mol_type = other RNA; note = RTT (AAGAAT-to-CAGAAC PAM silencing edit)
gtaacctccatggctcagtgaacaagttctgcaa

SEQ ID NO: 257 - RNA, 34 nt, synthetic construct
  source 1..34: mol_type = other RNA; note = RTT (AAGAAT-to-CAAAAC PAM silencing edit)
gtaacctccatggctcagtgaacaagttttgcaa

SEQ ID NO: 258 - RNA, 35 nt, synthetic construct
  source 1..35: mol_type = other RNA; note = RTT
tgtaacctccatggctcagtgaacaaattctgcaa

SEQ ID NO: 259 - RNA, 35 nt, synthetic construct
  source 1..35: mol_type = other RNA; note = RTT (AAG-to-CAA;AAGAAT-to- CAAAAT PAM silencing edit)
tgtaacctccatggctcagtgaacaaattttgcaa

SEQ ID NO: 260 - RNA, 35 nt, synthetic construct
  source 1..35: mol_type = other RNA; note = RTT (AAGAAT-to-CAGAAC PAM silencing edit)
tgtaacctccatggctcagtgaacaagttctgcaa

SEQ ID NO: 261 - RNA, 35 nt, synthetic construct
  source 1..35: mol_type = other RNA; note = RTT (AAGAAT-to-CAAAAC PAM silencing edit)
tgtaacctccatggctcagtgaacaagttttgcaa

SEQ ID NO: 262 - RNA, 36 nt, synthetic construct
  source 1..36: mol_type = other RNA; note = RTT
gtgtaacctccatggctcagtgaacaaattctgcaa

SEQ ID NO: 263 - RNA, 36 nt, synthetic construct
  source 1..36: mol_type = other RNA; note = RTT (AAG-to-CAA;AAGAAT-to- CAAAAT PAM silencing edit)
gtgtaacctccatggctcagtgaacaaattttgcaa

SEQ ID NO: 264 - RNA, 36 nt, synthetic construct
  source 1..36: mol_type = other RNA; note = RTT (AAGAAT-to-CAGAAC PAM silencing edit)
gtgtaacctccatggctcagtgaacaagttctgcaa

SEQ ID NO: 265 - RNA, 36 nt, synthetic construct
  source 1..36: mol_type = other RNA; note = RTT (AAGAAT-to-CAAAAC PAM silencing edit)
gtgtaacctccatggctcagtgaacaagttttgcaa

SEQ ID NO: 266 - RNA, 37 nt, synthetic construct
  source 1..37: mol_type = other RNA; note = RTT
agtgtaacctccatggctcagtgaacaaattctgcaa

SEQ ID NO: 267 - RNA, 37 nt, synthetic construct
  source 1..37: mol_type = other RNA; note = RTT (AAG-to-CAA;AAGAAT-to- CAAAAT PAM silencing edit)
agtgtaacctccatggctcagtgaacaaattttgcaa

SEQ ID NO: 268 - RNA, 37 nt, synthetic construct
  source 1..37: mol_type = other RNA; note = RTT (AAGAAT-to-CAGAAC PAM silencing edit)
agtgtaacctccatggctcagtgaacaagttctgcaa

SEQ ID NO: 269 - RNA, 37 nt, synthetic construct
  source 1..37: mol_type = other RNA; note = RTT (AAGAAT-to-CAAAAC PAM silencing edit)
agtgtaacctccatggctcagtgaacaagttttgcaa

SEQ ID NO: 270 - RNA, 38 nt, synthetic construct
  source 1..38: mol_type = other RNA; note = RTT
cagtgtaacctccatggctcagtgaacaaattctgcaa

SEQ ID NO: 271 - RNA, 38 nt, synthetic construct
  source 1..38: mol_type = other RNA; note = RTT (AAG-to-CAA;AAGAAT-to- CAAAAT PAM silencing edit)
cagtgtaacctccatggctcagtgaacaaattttgcaa

SEQ ID NO: 272 - RNA, 38 nt, synthetic construct
  source 1..38: mol_type = other RNA; note = RTT (AAGAAT-to-CAGAAC PAM silencing edit)
cagtgtaacctccatggctcagtgaacaagttctgcaa

SEQ ID NO: 273 - RNA, 38 nt, synthetic construct
  source 1..38: mol_type = other RNA; note = RTT (AAGAAT-to-CAAAAC PAM silencing edit)
cagtgtaacctccatggctcagtgaacaagttttgcaa

SEQ ID NO: 274 - RNA, 39 nt, synthetic construct
  source 1..39: mol_type = other RNA; note = RTT
ccagtgtaacctccatggctcagtgaacaaattctgcaa

SEQ ID NO: 275 - RNA, 39 nt, synthetic construct
  source 1..39: mol_type = other RNA; note = RTT (AAG-to-CAA;AAGAAT-to- CAAAAT PAM silencing edit)
ccagtgtaacctccatggctcagtgaacaaattttgcaa

SEQ ID NO: 276 - RNA, 39 nt, synthetic construct
  source 1..39: mol_type = other RNA; note = RTT (AAGAAT-to-CAGAAC PAM silencing edit)
ccagtgtaacctccatggctcagtgaacaagttctgcaa

SEQ ID NO: 277 - RNA, 39 nt, synthetic construct
  source 1..39: mol_type = other RNA; note = RTT (AAGAAT-to-CAAAAC PAM silencing edit)
ccagtgtaacctccatggctcagtgaacaagttttgcaa

SEQ ID NO: 278 - RNA, 40 nt, synthetic construct
  source 1..40: mol_type = other RNA; note = RTT
gccagtgtaacctccatggctcagtgaacaaattctgcaa

SEQ ID NO: 279 - RNA, 40 nt, synthetic construct
  source 1..40: mol_type = other RNA; note = RTT (AAG-to-CAA;AAGAAT-to- CAAAAT PAM silencing edit)
gccagtgtaacctccatggctcagtgaacaaattttgcaa

SEQ ID NO: 280 - RNA, 40 nt, synthetic construct
  source 1..40: mol_type = other RNA; note = RTT (AAGAAT-to-CAGAAC PAM silencing edit)
gccagtgtaacctccatggctcagtgaacaagttctgcaa

SEQ ID NO: 281 - RNA, 40 nt, synthetic construct
  source 1..40: mol_type = other RNA; note = RTT (AAGAAT-to-CAAAAC PAM silencing edit)
gccagtgtaacctccatggctcagtgaacaagttttgcaa

SEQ ID NO: 282 - RNA, 20 nt, synthetic construct
  source 1..20: mol_type = other RNA; note = PE3 ngRNA spacer (TG PAM)
atggctcagtgaacaaattc

SEQ ID NO: 283 - RNA, 20 nt, synthetic construct
  source 1..20: mol_type = other RNA; note = PE3 ngRNA spacer (TTCAAT PAM)
atggctcagtgaacaagttc

SEQ ID NO: 284 - RNA, 20 nt, synthetic construct
  source 1..20: mol_type = other RNA; note = PE3 ngRNA spacer (CAG PAM)
atgttggatgtgagccctgc

SEQ ID NO: 285 - RNA, 20 nt, synthetic construct
  source 1..20: mol_type = other RNA; note = PE3 ngRNA spacer (CAG PAM)
ccagtgtaacctccatggct

SEQ ID NO: 286 - RNA, 20 nt, synthetic construct
  source 1..20: mol_type = other RNA; note = PE3 ngRNA spacer (TTTAAT PAM)
gatttaaatttctccgaagc

SEQ ID NO: 287 - RNA, 20 nt, synthetic construct
  source 1..20: mol_type = other RNA; note = PE3 ngRNA spacer (GAG PAM)
gctttaatgatgttggatgt

SEQ ID NO: 288 - RNA, 20 nt, synthetic construct
  source 1..20: mol_type = other RNA; note = PEgRNA spacer (ACAAAT PAM)
taacctccatggctcagtga

SEQ ID NO: 289 - RNA, 20 nt, synthetic construct
  source 1..20: mol_type = other RNA; note = PE3 ngRNA spacer (TTGGAT PAM)
taggtgtgatcattgcaatt

SEQ ID NO: 290 - RNA, 20 nt, synthetic construct
  source 1..20: mol_type = other RNA; note = PE3 ngRNA spacer (TTGG PAM)
tctccgaagctttaatgatg

SEQ ID NO: 291 - RNA, 20 nt, synthetic construct
  source 1..20: mol_type = other RNA; note = PE3 ngRNA spacer (TTAAAT PAM)
tgatcattgcaattttggat

SEQ ID NO: 292 - RNA, 20 nt, synthetic construct
  source 1..20: mol_type = other RNA; note = PE3 ngRNA spacer (GCCAGT PAM)
tgatgttggatgtgagccct

SEQ ID NO: 293 - RNA, 20 nt, synthetic construct
  source 1..20: mol_type = other RNA; note = PE3 ngRNA spacer (CTCAGT PAM)
tgccagtgtaacctccatgg

SEQ ID NO: 294 - RNA, 20 nt, synthetic construct
  source 1..20: mol_type = other RNA; note = PE3 ngRNA spacer (AATGAT PAM)
ttaaatttctccgaagcttt

SEQ ID NO: 295 - RNA, 20 nt, synthetic construct
  source 1..20: mol_type = other RNA; note = PE3 ngRNA spacer (AAG PAM)
tttggatttaaatttctccg

SEQ ID NO: 296 - RNA, 17 nt, synthetic construct
  source 1..17: mol_type = other RNA; note = PEgRNA spacer (TG;TGCAAT PAM)
gctcagtgaacaaattc

SEQ ID NO: 297 - RNA, 18 nt, synthetic construct
  source 1..18: mol_type = other RNA; note = PEgRNA spacer (TG;TGCAAT PAM)
ggctcagtgaacaaattc

SEQ ID NO: 298 - RNA, 19 nt, synthetic construct
  source 1..19: mol_type = other RNA; note = PEgRNA spacer (TG;TGCAAT PAM)
tggctcagtgaacaaattc

SEQ ID NO: 299 - RNA, 21 nt, synthetic construct
  source 1..21: mol_type = other RNA; note = PEgRNA spacer (TG;TGCAAT PAM)
catggctcagtgaacaaattc

SEQ ID NO: 300 - RNA, 22 nt, synthetic construct
  source 1..22: mol_type = other RNA; note = PEgRNA spacer (TG;TGCAAT PAM)
ccatggctcagtgaacaaattc

SEQ ID NO: 301-305 - skipped (5 entries)

SEQ ID NO: 306 - RNA, 10 nt, synthetic construct
  source 1..10: mol_type = other RNA; note = PBS
tttgttcact

SEQ ID NO: 307 - RNA, 11 nt, synthetic construct
  source 1..11: mol_type = other RNA; note = PBS
tttgttcactg

SEQ ID NO: 308 - RNA, 12 nt, synthetic construct
  source 1..12: mol_type = other RNA; note = PBS
tttgttcactga

SEQ ID NO: 309 - RNA, 13 nt, synthetic construct
  source 1..13: mol_type = other RNA; note = PBS
tttgttcactgag

SEQ ID NO: 310 - RNA, 14 nt, synthetic construct
  source 1..14: mol_type = other RNA; note = PBS
tttgttcactgagc

SEQ ID NO: 311 - RNA, 15 nt, synthetic construct
  source 1..15: mol_type = other RNA; note = PBS
tttgttcactgagcc

SEQ ID NO: 312 - RNA, 16 nt, synthetic construct
  source 1..16: mol_type = other RNA; note = PBS
tttgttcactgagcca

SEQ ID NO: 313 - RNA, 17 nt, synthetic construct
  source 1..17: mol_type = other RNA; note = PBS
tttgttcactgagccat

SEQ ID NO: 314 - RNA, 18 nt, synthetic construct
  source 1..18: mol_type = other RNA; note = PBS
tttgttcactgagccatg

SEQ ID NO: 315 - RNA, 19 nt, synthetic construct
  source 1..19: mol_type = other RNA; note = PBS
tttgttcactgagccatgg

SEQ ID NO: 316 - skipped

SEQ ID NO: 317 - RNA, 10 nt, synthetic construct
  source 1..10: mol_type = other RNA; note = RTT
gattgcagaa

SEQ ID NO: 318 - RNA, 11 nt, synthetic construct
  source 1..11: mol_type = other RNA; note = RTT
ggattgcagaa

SEQ ID NO: 319 - RNA, 12 nt, synthetic construct
  source 1..12: mol_type = other RNA; note = RTT
aggattgcagaa

SEQ ID NO: 320 - RNA, 13 nt, synthetic construct
  source 1..13: mol_type = other RNA; note = PBS
gaggattgcagaa

SEQ ID NO: 321 - RNA, 13 nt, synthetic construct
  source 1..13: mol_type = other RNA; note = RTT (TTCAAT-to-TGCAAC PAM silencing edit)
gagggttgcagaa

SEQ ID NO: 322 - RNA, 14 nt, synthetic construct
  source 1..14: mol_type = other RNA; note = PBS
tgaggattgcagaa

SEQ ID NO: 323 - RNA, 14 nt, synthetic construct
  source 1..14: mol_type = other RNA; note = RTT (TTCAAT-to-TGCAAC PAM silencing edit)
tgagggttgcagaa

SEQ ID NO: 324 - RNA, 15 nt, synthetic construct
  source 1..15: mol_type = other RNA; note = PBS
gtgaggattgcagaa

SEQ ID NO: 325 - RNA, 15 nt, synthetic construct
  source 1..15: mol_type = other RNA; note = RTT (TTCAAT-to-TGCAAC PAM silencing edit)
gtgagggttgcagaa

SEQ ID NO: 326 - RNA, 16 nt, synthetic construct
  source 1..16: mol_type = other RNA; note = PBS
agtgaggattgcagaa

SEQ ID NO: 327 - RNA, 16 nt, synthetic construct
  source 1..16: mol_type = other RNA; note = RTT (TTCAAT-to-TGCAAC PAM silencing edit)
agtgagggttgcagaa

SEQ ID NO: 328 - RNA, 17 nt, synthetic construct
  source 1..17: mol_type = other RNA; note = RTT
gagtgaggattgcagaa

SEQ ID NO: 329 - RNA, 17 nt, synthetic construct
  source 1..17: mol_type = other RNA; note = RTT (TTCAAT-to-TGCAAC PAM silencing edit)
gagtgagggttgcagaa

SEQ ID NO: 330 - RNA, 18 nt, synthetic construct
  source 1..18: mol_type = other RNA; note = PBS
agagtgaggattgcagaa

SEQ ID NO: 331 - RNA, 18 nt, synthetic construct
  source 1..18: mol_type = other RNA; note = RTT (TTCAAT-to-TGCAAC PAM silencing edit)
agagtgagggttgcagaa

SEQ ID NO: 332 - RNA, 19 nt, synthetic construct
  source 1..19: mol_type = other RNA; note = PBS
cagagtgaggattgcagaa

SEQ ID NO: 333 - RNA, 19 nt, synthetic construct
  source 1..19: mol_type = other RNA; note = RTT (TTCAAT-to-TGCAAC PAM silencing edit)
cagagtgagggttgcagaa

SEQ ID NO: 334 - RNA, 20 nt, synthetic construct
  source 1..20: mol_type = other RNA; note = RTT
ccagagtgaggattgcagaa

SEQ ID NO: 335 - RNA, 20 nt, synthetic construct
  source 1..20: mol_type = other RNA; note = RTT (TTCAAT-to-TGCAAC PAM silencing edit)
ccagagtgagggttgcagaa

SEQ ID NO: 336 - RNA, 21 nt, synthetic construct
  source 1..21: mol_type = other RNA; note = RTT
cccagagtgaggattgcagaa

SEQ ID NO: 337 - RNA, 21 nt, synthetic construct
  source 1..21: mol_type = other RNA; note = RTT (TTCAAT-to-TGCAAC PAM silencing edit)
cccagagtgagggttgcagaa

SEQ ID NO: 338 - RNA, 22 nt, synthetic construct
  source 1..22: mol_type = other RNA; note = RTT
gcccagagtgaggattgcagaa

SEQ ID NO: 339 - RNA, 22 nt, synthetic construct
  source 1..22: mol_type = other RNA; note = RTT (TTCAAT-to-TGCAAC PAM silencing edit)
gcccagagtgagggttgcagaa

SEQ ID NO: 340 - RNA, 23 nt, synthetic construct
  source 1..23: mol_type = other RNA; note = RTT
tgcccagagtgaggattgcagaa

SEQ ID NO: 341 - RNA, 23 nt, synthetic construct
  source 1..23: mol_type = other RNA; note = RTT (TTCAAT-to-TGCAAC PAM silencing edit)
tgcccagagtgagggttgcagaa

SEQ ID NO: 342 - RNA, 24 nt, synthetic construct
  source 1..24: mol_type = other RNA; note = RTT
ctgcccagagtgaggattgcagaa

SEQ ID NO: 343 - RNA, 24 nt, synthetic construct
  source 1..24: mol_type = other RNA; note = RTT (TTCAAT-to-TGCAAC PAM silencing edit)
ctgcccagagtgagggttgcagaa

SEQ ID NO: 344 - RNA, 25 nt, synthetic construct
  source 1..25: mol_type = other RNA; note = RTT
actgcccagagtgaggattgcagaa

SEQ ID NO: 345 - RNA, 25 nt, synthetic construct
  source 1..25: mol_type = other RNA; note = RTT (TTCAAT-to-TGCAAC PAM silencing edit)
actgcccagagtgagggttgcagaa

SEQ ID NO: 346 - RNA, 26 nt, synthetic construct
  source 1..26: mol_type = other RNA; note = RTT
cactgcccagagtgaggattgcagaa

SEQ ID NO: 347 - RNA, 26 nt, synthetic construct
  source 1..26: mol_type = other RNA; note = RTT (TTCAAT-to-TGCAAC PAM silencing edit)
cactgcccagagtgagggttgcagaa

SEQ ID NO: 348 - RNA, 27 nt, synthetic construct
  source 1..27: mol_type = other RNA; note = RTT
acactgcccagagtgaggattgcagaa

SEQ ID NO: 349 - RNA, 27 nt, synthetic construct
  source 1..27: mol_type = other RNA; note = RTT (TTCAAT-to-TGCAAC PAM silencing edit)
acactgcccagagtgagggttgcagaa

SEQ ID NO: 350 - RNA, 28 nt, synthetic construct
  source 1..28: mol_type = other RNA; note = RTT
cacactgcccagagtgaggattgcagaa

SEQ ID NO: 351 - RNA, 28 nt, synthetic construct
  source 1..28: mol_type = other RNA; note = RTT (TTCAAT-to-TGCAAC PAM silencing edit)
cacactgcccagagtgagggttgcagaa

SEQ ID NO: 352 - RNA, 29 nt, synthetic construct
  source 1..29: mol_type = other RNA; note = RTT
tcacactgcccagagtgaggattgcagaa

SEQ ID NO: 353 - RNA, 29 nt, synthetic construct
  source 1..29: mol_type = other RNA; note = RTT (TTCAAT-to-TGCAAC PAM silencing edit)
tcacactgcccagagtgagggttgcagaa

SEQ ID NO: 354 - RNA, 30 nt, synthetic construct
  source 1..30: mol_type = other RNA; note = RTT
ctcacactgcccagagtgaggattgcagaa

SEQ ID NO: 355 - RNA, 30 nt, synthetic construct
  source 1..30: mol_type = other RNA; note = RTT (TTCAAT-to-TGCAAC PAM silencing edit)
ctcacactgcccagagtgagggttgcagaa

SEQ ID NO: 356 - RNA, 31 nt, synthetic construct
  source 1..31: mol_type = other RNA; note = RTT
actcacactgcccagagtgaggattgcagaa

SEQ ID NO: 357 - RNA, 31 nt, synthetic construct
  source 1..31: mol_type = other RNA; note = RTT (TTCAAT-to-TGCAAC PAM silencing edit)
actcacactgcccagagtgagggttgcagaa

SEQ ID NO: 358 - RNA, 32 nt, synthetic construct
  source 1..32: mol_type = other RNA; note = RTT*1,2,3,4,5,6,7,8 (dual correction)
cactcacactgcccagagtgaggattgcagaa

SEQ ID NO: 359 - RNA, 32 nt, synthetic construct
  source 1..32: mol_type = other RNA; note = RTT*4,8 (dual correction; TGCAAT-to- TGCAAC PAM silencing edit)
cactcacactgcccagagtgagggttgcagaa

SEQ ID NO: 360 - RNA, 33 nt, synthetic construct
  source 1..33: mol_type = other RNA; note = RTT*1,2,3,4,5,6,7,8 (dual correction)
gcactcacactgcccagagtgaggattgcagaa

SEQ ID NO: 361 - RNA, 33 nt, synthetic construct
  source 1..33: mol_type = other RNA; note = RTT*4,8 (dual correction; TGCAAT-to- TGCAAC PAM silencing edit)
gcactcacactgcccagagtgagggttgcagaa

SEQ ID NO: 362 - RNA, 34 nt, synthetic construct
  source 1..34: mol_type = other RNA; note = RTT*1,2,3,4,5,6,7,8 (dual correction)
tgcactcacactgcccagagtgaggattgcagaa

SEQ ID NO: 363 - RNA, 34 nt, synthetic construct
  source 1..34: mol_type = other RNA; note = RTT*4,8 (dual correction; TGCAAT-to- TGCAAC PAM silencing edit)
tgcactcacactgcccagagtgagggttgcagaa

SEQ ID NO: 364 - RNA, 35 nt, synthetic construct
  source 1..35: mol_type = other RNA; note = RTT*1,2,3,4,5,6,7,8 (dual correction)
ttgcactcacactgcccagagtgaggattgcagaa

SEQ ID NO: 365 - RNA, 35 nt, synthetic construct
  source 1..35: mol_type = other RNA; note = RTT*4,8 (dual correction; TGCAAT-to- TGCAAC PAM silencing edit)
ttgcactcacactgcccagagtgagggttgcagaa

SEQ ID NO: 366 - RNA, 36 nt, synthetic construct
  source 1..36: mol_type = other RNA; note = RTT*1,2,3,4,5,6,7,8 (dual correction)
tttgcactcacactgcccagagtgaggattgcagaa

SEQ ID NO: 367 - RNA, 36 nt, synthetic construct
  source 1..36: mol_type = other RNA; note = RTT*4,8 (dual correction; TGCAAT-to- TGCAAC PAM silencing edit)
tttgcactcacactgcccagagtgagggttgcagaa

SEQ ID NO: 368 - RNA, 37 nt, synthetic construct
  source 1..37: mol_type = other RNA; note = RTT*1,2,3,4,5,6,7,8 (dual correction)
ttttgcactcacactgcccagagtgaggattgcagaa

SEQ ID NO: 369 - RNA, 37 nt, synthetic construct
  source 1..37: mol_type = other RNA; note = RTT*4,8 (dual correction; TGCAAT-to- TGCAAC PAM silencing edit)
ttttgcactcacactgcccagagtgagggttgcagaa

SEQ ID NO: 370 - RNA, 38 nt, synthetic construct
  source 1..38: mol_type = other RNA; note = RTT*1,2,3,4,5,6,7,8 (dual correction)
tttttgcactcacactgcccagagtgaggattgcagaa

SEQ ID NO: 371 - RNA, 38 nt, synthetic construct
  source 1..38: mol_type = other RNA; note = RTT*4,8 (dual correction; TGCAAT-to- TGCAAC PAM silencing edit)
tttttgcactcacactgcccagagtgagggttgcagaa

SEQ ID NO: 372 - RNA, 39 nt, synthetic construct
  source 1..39: mol_type = other RNA; note = RTT*1,2,3,4,5,6,7,8 (dual correction)
ttttttgcactcacactgcccagagtgaggattgcagaa

SEQ ID NO: 373 - RNA, 39 nt, synthetic construct
  source 1..39: mol_type = other RNA; note = RTT*4,8 (dual correction; TGCAAT-to- TGCAAC PAM silencing edit)
ttttttgcactcacactgcccagagtgagggttgcagaa

SEQ ID NO: 374 - RNA, 40 nt, synthetic construct
  source 1..40: mol_type = other RNA; note = RTT*1,2,3,4,5,6,7,8 (dual correction)
cttttttgcactcacactgcccagagtgaggattgcagaa

SEQ ID NO: 375 - RNA, 40 nt, synthetic construct
  source 1..40: mol_type = other RNA; note = RTT*4,8 (dual correction; TGCAAT-to- TGCAAC PAM silencing edit)
cttttttgcactcacactgcccagagtgagggttgcagaa

SEQ ID NO: 376 - RNA, 20 nt, synthetic construct
  source 1..20: mol_type = other RNA; note = PE3 ngRNA spacer (GCAGGT PAM)
aacccataaaagttttctct

SEQ ID NO: 377 - RNA, 20 nt, synthetic construct
  source 1..20: mol_type = other RNA; note = PE3 ngRNA spacer (CAGAAT PAM)
actgcccagagtgagggttg

SEQ ID NO: 378 - RNA, 20 nt, synthetic construct
  source 1..20: mol_type = other RNA; note = PE3 ngRNA spacer (AAAAGT PAM)
attggtgacatctaacccat

SEQ ID NO: 379 - RNA, 20 nt, synthetic construct
  source 1..20: mol_type = other RNA; note = PE3b ngRNA spacer (GAGGAT PAM)
gcactcacactgcccagagt

SEQ ID NO: 380 - RNA, 20 nt, synthetic construct
  source 1..20: mol_type = other RNA; note = PE3 ngRNA spacer (TGAAGT PAM)
tttctctgcaggtgtcacac

SEQ ID NO: 381 - RNA, 20 nt, synthetic construct
  source 1..20: mol_type = other RNA; note = PE3b ngRNA spacer (CAGAGT PAM)
ttttttgcactcacactgcc

SEQ ID NO: 382 - RNA, 17 nt, synthetic construct
  source 1..17: mol_type = other RNA; note = PEgRNA spacer (AG;AGA PAM)
cccagagtgaggattga

SEQ ID NO: 383 - RNA, 18 nt, synthetic construct
  source 1..18: mol_type = other RNA; note = PEgRNA spacer (AG;AGA PAM)
gcccagagtgaggattga

SEQ ID NO: 384 - RNA, 19 nt, synthetic construct
  source 1..19: mol_type = other RNA; note = PEgRNA spacer (AG;AGA PAM)
tgcccagagtgaggattga

SEQ ID NO: 385 - RNA, 20 nt, synthetic construct
  source 1..20: mol_type = other RNA; note = PEgRNA spacer (AG;AGA PAM)
ctgcccagagtgaggattga

SEQ ID NO: 386 - RNA, 21 nt, synthetic construct
  source 1..21: mol_type = other RNA; note = PEgRNA spacer (AG;AGA PAM)
actgcccagagtgaggattga

SEQ ID NO: 387 - RNA, 22 nt, synthetic construct
  source 1..22: mol_type = other RNA; note = PEgRNA spacer (AG;AGA PAM)
cactgcccagagtgaggattga

SEQ ID NO: 388-392 - skipped (5 entries)

SEQ ID NO: 393 - RNA, 10 nt, synthetic construct
  source 1..10: mol_type = other RNA; note = PBS
atcctcactc

SEQ ID NO: 394 - RNA, 11 nt, synthetic construct
  source 1..11: mol_type = other RNA; note = PBS
atcctcactct

SEQ ID NO: 395 - RNA, 12 nt, synthetic construct
  source 1..12: mol_type = other RNA; note = PBS
atcctcactctg

SEQ ID NO: 396 - RNA, 13 nt, synthetic construct
  source 1..13: mol_type = other RNA; note = PBS
atcctcactctgg

SEQ ID NO: 397 - RNA, 14 nt, synthetic construct
  source 1..14: mol_type = other RNA; note = PBS
atcctcactctggg

SEQ ID NO: 398 - RNA, 15 nt, synthetic construct
  source 1..15: mol_type = other RNA; note = PBS
atcctcactctgggc

SEQ ID NO: 399 - RNA, 16 nt, synthetic construct
  source 1..16: mol_type = other RNA; note = PBS
atcctcactctgggca

SEQ ID NO: 400 - RNA, 17 nt, synthetic construct
  source 1..17: mol_type = other RNA; note = PEgRNA spacer (TG;TGTAGT PAM)
atcctcactctgggcag

SEQ ID NO: 401 - RNA, 18 nt, synthetic construct
  source 1..18: mol_type = other RNA; note = PBS
atcctcactctgggcagt

SEQ ID NO: 402 - RNA, 19 nt, synthetic construct
  source 1..19: mol_type = other RNA; note = PEgRNA spacer (TAG PAM)
atcctcactctgggcagtg

SEQ ID NO: 403-406 - skipped (4 entries)

SEQ ID NO: 407 - RNA, 10 nt, synthetic construct
  source 1..10: mol_type = other RNA; note = RTT
aaattctgca

SEQ ID NO: 408 - RNA, 10 nt, synthetic construct
  source 1..10: mol_type = other RNA; note = RTT (AG-to-AA;AGA-to-AAA PAM silencing edit)
aaattttgca

SEQ ID NO: 409 - RNA, 11 nt, synthetic construct
  source 1..11: mol_type = other RNA; note = RTT
caaattctgca

SEQ ID NO: 410 - RNA, 11 nt, synthetic construct
  source 1..11: mol_type = other RNA; note = RTT (AG-to-AA;AGA-to-AAA PAM silencing edit)
caaattttgca

SEQ ID NO: 411 - RNA, 12 nt, synthetic construct
  source 1..12: mol_type = other RNA; note = RTT
acaaattctgca

SEQ ID NO: 412 - RNA, 12 nt, synthetic construct
  source 1..12: mol_type = other RNA; note = RTT (AG-to-AA;AGA-to-AAA PAM silencing edit)
acaaattttgca

SEQ ID NO: 413 - RNA, 13 nt, synthetic construct
  source 1..13: mol_type = other RNA; note = RTT
aacaaattctgca

SEQ ID NO: 414 - RNA, 13 nt, synthetic construct
  source 1..13: mol_type = other RNA; note = RTT (AG-to-AA;AGA-to-AAA PAM silencing edit)
aacaaattttgca

SEQ ID NO: 415 - RNA, 14 nt, synthetic construct
  source 1..14: mol_type = other RNA; note = RTT
gaacaaattctgca

SEQ ID NO: 416 - RNA, 14 nt, synthetic construct
  source 1..14: mol_type = other RNA; note = RTT (AG-to-AA;AGA-to-AAA PAM silencing edit)
gaacaaattttgca

SEQ ID NO: 417 - RNA, 15 nt, synthetic construct
  source 1..15: mol_type = other RNA; note = RTT
tgaacaaattctgca

SEQ ID NO: 418 - RNA, 15 nt, synthetic construct
  source 1..15: mol_type = other RNA; note = RTT (AG-to-AA;AGA-to-AAA PAM silencing edit)
tgaacaaattttgca

SEQ ID NO: 419 - RNA, 16 nt, synthetic construct
  source 1..16: mol_type = other RNA; note = RTT
gtgaacaaattctgca

SEQ ID NO: 420 - RNA, 16 nt, synthetic construct
  source 1..16: mol_type = other RNA; note = RTT (AG-to-AA;AGA-to-AAA PAM silencing edit)
gtgaacaaattttgca

SEQ ID NO: 421 - RNA, 17 nt, synthetic construct
  source 1..17: mol_type = other RNA; note = RTT
agtgaacaaattctgca

SEQ ID NO: 422 - RNA, 17 nt, synthetic construct
  source 1..17: mol_type = other RNA; note = RTT (AG-to-AA;AGA-to-AAA PAM silencing edit)
agtgaacaaattttgca

SEQ ID NO: 423 - RNA, 18 nt, synthetic construct
  source 1..18: mol_type = other RNA; note = RTT
cagtgaacaaattctgca

SEQ ID NO: 424 - RNA, 18 nt, synthetic construct
  source 1..18: mol_type = other RNA; note = RTT (AG-to-AA;AGA-to-AAA PAM silencing edit)
cagtgaacaaattttgca

SEQ ID NO: 425 - RNA, 19 nt, synthetic construct
  source 1..19: mol_type = other RNA; note = RTT
tcagtgaacaaattctgca

SEQ ID NO: 426 - RNA, 19 nt, synthetic construct
  source 1..19: mol_type = other RNA; note = RTT (AG-to-AA;AGA-to-AAA PAM silencing edit)
tcagtgaacaaattttgca

SEQ ID NO: 427 - RNA, 20 nt, synthetic construct
  source 1..20: mol_type = other RNA; note = RTT
ctcagtgaacaaattctgca

SEQ ID NO: 428 - RNA, 20 nt, synthetic construct
  source 1..20: mol_type = other RNA; note = RTT (AG-to-AA;AGA-to-AAA PAM silencing edit)
ctcagtgaacaaattttgca

SEQ ID NO: 429 - RNA, 21 nt, synthetic construct
  source 1..21: mol_type = other RNA; note = RTT
gctcagtgaacaaattctgca

SEQ ID NO: 430 - RNA, 21 nt, synthetic construct
  source 1..21: mol_type = other RNA; note = RTT (AG-to-AA;AGA-to-AAA PAM silencing edit)
gctcagtgaacaaattttgca

SEQ ID NO: 431 - RNA, 22 nt, synthetic construct
  source 1..22: mol_type = other RNA; note = RTT
ggctcagtgaacaaattctgca

SEQ ID NO: 432 - RNA, 22 nt, synthetic construct
  source 1..22: mol_type = other RNA; note = RTT (AG-to-AA;AGA-to-AAA PAM silencing edit)
ggctcagtgaacaaattttgca

SEQ ID NO: 433 - RNA, 23 nt, synthetic construct
  source 1..23: mol_type = other RNA; note = RTT
tggctcagtgaacaaattctgca

SEQ ID NO: 434 - RNA, 23 nt, synthetic construct
  source 1..23: mol_type = other RNA; note = RTT (AG-to-AA;AGA-to-AAA PAM silencing edit)
tggctcagtgaacaaattttgca

SEQ ID NO: 435 - RNA, 24 nt, synthetic construct
  source 1..24: mol_type = other RNA; note = RTT
atggctcagtgaacaaattctgca

SEQ ID NO: 436 - RNA, 24 nt, synthetic construct
  source 1..24: mol_type = other RNA; note = RTT (AG-to-AA;AGA-to-AAA PAM silencing edit)
atggctcagtgaacaaattttgca

SEQ ID NO: 437 - RNA, 25 nt, synthetic construct
  source 1..25: mol_type = other RNA; note = RTT
catggctcagtgaacaaattctgca

SEQ ID NO: 438 - RNA, 25 nt, synthetic construct
  source 1..25: mol_type = other RNA; note = RTT (AG-to-AA;AGA-to-AAA PAM silencing edit)
catggctcagtgaacaaattttgca

SEQ ID NO: 439 - RNA, 26 nt, synthetic construct
  source 1..26: mol_type = other RNA; note = RTT
ccatggctcagtgaacaaattctgca

SEQ ID NO: 440 - RNA, 26 nt, synthetic construct
  source 1..26: mol_type = other RNA; note = RTT (AG-to-AA;AGA-to-AAA PAM silencing edit)
ccatggctcagtgaacaaattttgca

SEQ ID NO: 441 - RNA, 27 nt, synthetic construct
  source 1..27: mol_type = other RNA; note = RTT
tccatggctcagtgaacaaattctgca

SEQ ID NO: 442 - RNA, 27 nt, synthetic construct
  source 1..27: mol_type = other RNA; note = RTT (AG-to-AA;AGA-to-AAA PAM silencing edit)
tccatggctcagtgaacaaattttgca

SEQ ID NO: 443 - RNA, 28 nt, synthetic construct
  source 1..28: mol_type = other RNA; note = RTT
ctccatggctcagtgaacaaattctgca

SEQ ID NO: 444 - RNA, 28 nt, synthetic construct
  source 1..28: mol_type = other RNA; note = RTT (AG-to-AA;AGA-to-AAA PAM silencing edit)
ctccatggctcagtgaacaaattttgca

SEQ ID NO: 445 - RNA, 29 nt, synthetic construct
  source 1..29: mol_type = other RNA; note = RTT
cctccatggctcagtgaacaaattctgca

SEQ ID NO: 446 - RNA, 29 nt, synthetic construct
  source 1..29: mol_type = other RNA; note = RTT (AG-to-AA;AGA-to-AAA PAM silencing edit)
cctccatggctcagtgaacaaattttgca

SEQ ID NO: 447 - RNA, 30 nt, synthetic construct
  source 1..30: mol_type = other RNA; note = RTT
acctccatggctcagtgaacaaattctgca

SEQ ID NO: 448 - RNA, 30 nt, synthetic construct
  source 1..30: mol_type = other RNA; note = RTT (AG-to-AA;AGA-to-AAA PAM silencing edit)
acctccatggctcagtgaacaaattttgca

SEQ ID NO: 449 - RNA, 31 nt, synthetic construct
  source 1..31: mol_type = other RNA; note = RTT
aacctccatggctcagtgaacaaattctgca

SEQ ID NO: 450 - RNA, 31 nt, synthetic construct
  source 1..31: mol_type = other RNA; note = RTT (AG-to-AA;AGA-to-AAA PAM silencing edit)
aacctccatggctcagtgaacaaattttgca

SEQ ID NO: 451 - RNA, 32 nt, synthetic construct
  source 1..32: mol_type = other RNA; note = RTT
taacctccatggctcagtgaacaaattctgca

SEQ ID NO: 452 - RNA, 32 nt, synthetic construct
  source 1..32: mol_type = other RNA; note = RTT (AG-to-AA;AGA-to-AAA PAM silencing edit)
taacctccatggctcagtgaacaaattttgca

SEQ ID NO: 453 - RNA, 33 nt, synthetic construct
  source 1..33: mol_type = other RNA; note = RTT
gtaacctccatggctcagtgaacaaattctgca

SEQ ID NO: 454 - RNA, 33 nt, synthetic construct
  source 1..33: mol_type = other RNA; note = RTT (AG-to-AA;AGA-to-AAA PAM silencing edit)
gtaacctccatggctcagtgaacaaattttgca

SEQ ID NO: 455 - RNA, 34 nt, synthetic construct
  source 1..34: mol_type = other RNA; note = RTT
tgtaacctccatggctcagtgaacaaattctgca

SEQ ID NO: 456 - RNA, 34 nt, synthetic construct
  source 1..34: mol_type = other RNA; note = RTT (AG-to-AA;AGA-to-AAA PAM silencing edit)
tgtaacctccatggctcagtgaacaaattttgca

SEQ ID NO: 457 - RNA, 35 nt, synthetic construct
  source 1..35: mol_type = other RNA; note = RTT
gtgtaacctccatggctcagtgaacaaattctgca

SEQ ID NO: 458 - RNA, 35 nt, synthetic construct
  source 1..35: mol_type = other RNA; note = RTT (AG-to-AA;AGA-to-AAA PAM silencing edit)
gtgtaacctccatggctcagtgaacaaattttgca

SEQ ID NO: 459 - RNA, 36 nt, synthetic construct
  source 1..36: mol_type = other RNA; note = RTT
agtgtaacctccatggctcagtgaacaaattctgca

SEQ ID NO: 460 - RNA, 36 nt, synthetic construct
  source 1..36: mol_type = other RNA; note = RTT (AG-to-AA;AGA-to-AAA PAM silencing edit)
agtgtaacctccatggctcagtgaacaaattttgca

SEQ ID NO: 461 - RNA, 37 nt, synthetic construct
  source 1..37: mol_type = other RNA; note = RTT
cagtgtaacctccatggctcagtgaacaaattctgca

SEQ ID NO: 462 - RNA, 37 nt, synthetic construct
  source 1..37: mol_type = other RNA; note = RTT (AG-to-AA;AGA-to-AAA PAM silencing edit)
cagtgtaacctccatggctcagtgaacaaattttgca

SEQ ID NO: 463 - RNA, 38 nt, synthetic construct
  source 1..38: mol_type = other RNA; note = RTT
ccagtgtaacctccatggctcagtgaacaaattctgca

SEQ ID NO: 464 - RNA, 38 nt, synthetic construct
  source 1..38: mol_type = other RNA; note = RTT (AG-to-AA;AGA-to-AAA PAM silencing edit)
ccagtgtaacctccatggctcagtgaacaaattttgca

SEQ ID NO: 465 - RNA, 39 nt, synthetic construct
  source 1..39: mol_type = other RNA; note = RTT
gccagtgtaacctccatggctcagtgaacaaattctgca

SEQ ID NO: 466 - RNA, 39 nt, synthetic construct
  source 1..39: mol_type = other RNA; note = RTT (AG-to-AA;AGA-to-AAA PAM silencing edit)
gccagtgtaacctccatggctcagtgaacaaattttgca

SEQ ID NO: 467 - RNA, 40 nt, synthetic construct
  source 1..40: mol_type = other RNA; note = RTT
tgccagtgtaacctccatggctcagtgaacaaattctgca

SEQ ID NO: 468 - RNA, 40 nt, synthetic construct
  source 1..40: mol_type = other RNA; note = RTT (AG-to-AA;AGA-to-AAA PAM silencing edit)
tgccagtgtaacctccatggctcagtgaacaaattttgca

SEQ ID NO: 469 - RNA, 17 nt, synthetic construct
  source 1..17: mol_type = other RNA; note = PEgRNA spacer (ACAAAT PAM)
cctccatggctcagtga

SEQ ID NO: 470 - RNA, 18 nt, synthetic construct
  source 1..18: mol_type = other RNA; note = PEgRNA spacer (ACAAAT PAM)
acctccatggctcagtga

SEQ ID NO: 471 - RNA, 19 nt, synthetic construct
  source 1..19: mol_type = other RNA; note = PEgRNA spacer (ACAAAT PAM)
aacctccatggctcagtga

SEQ ID NO: 472 - RNA, 21 nt, synthetic construct
  source 1..21: mol_type = other RNA; note = PEgRNA spacer (ACAAAT PAM)
gtaacctccatggctcagtga

SEQ ID NO: 473 - RNA, 22 nt, synthetic construct
  source 1..22: mol_type = other RNA; note = PEgRNA spacer (ACAAAT PAM)
tgtaacctccatggctcagtga

SEQ ID NO: 474-478 - skipped (5 entries)

SEQ ID NO: 479 - RNA, 10 nt, synthetic construct
  source 1..10: mol_type = other RNA; note = PBS
ctgagccatg

SEQ ID NO: 480 - RNA, 11 nt, synthetic construct
  source 1..11: mol_type = other RNA; note = PBS
ctgagccatgg

SEQ ID NO: 481 - RNA, 12 nt, synthetic construct
  source 1..12: mol_type = other RNA; note = PBS
ctgagccatgga

SEQ ID NO: 482 - RNA, 13 nt, synthetic construct
  source 1..13: mol_type = other RNA; note = PBS
ctgagccatggag

SEQ ID NO: 483 - RNA, 14 nt, synthetic construct
  source 1..14: mol_type = other RNA; note = PBS
ctgagccatggagg

SEQ ID NO: 484 - RNA, 15 nt, synthetic construct
  source 1..15: mol_type = other RNA; note = PBS
ctgagccatggaggt

SEQ ID NO: 485 - RNA, 16 nt, synthetic construct
  source 1..16: mol_type = other RNA; note = PBS
ctgagccatggaggtt

SEQ ID NO: 486 - RNA, 17 nt, synthetic construct
  source 1..17: mol_type = other RNA; note = PBS
ctgagccatggaggtta

SEQ ID NO: 487 - RNA, 18 nt, synthetic construct
  source 1..18: mol_type = other RNA; note = PBS
ctgagccatggaggttac

SEQ ID NO: 488 - RNA, 19 nt, synthetic construct
  source 1..19: mol_type = other RNA; note = PBS
ctgagccatggaggttaca

SEQ ID NO: 489 - RNA, 17 nt, synthetic construct
  source 1..17: mol_type = other RNA; note = RTT
attgcagaatttgttca

SEQ ID NO: 490 - RNA, 18 nt, synthetic construct
  source 1..18: mol_type = other RNA; note = RTT
gattgcagaatttgttca

SEQ ID NO: 491 - RNA, 19 nt, synthetic construct
  source 1..19: mol_type = other RNA; note = RTT
ggattgcagaatttgttca

SEQ ID NO: 492 - RNA, 20 nt, synthetic construct
  source 1..20: mol_type = other RNA; note = RTT
aggattgcagaatttgttca

SEQ ID NO: 493 - RNA, 21 nt, synthetic construct
  source 1..21: mol_type = other RNA; note = RTT
gaggattgcagaatttgttca

SEQ ID NO: 494 - RNA, 22 nt, synthetic construct
  source 1..22: mol_type = other RNA; note = RTT
tgaggattgcagaatttgttca

SEQ ID NO: 495 - RNA, 23 nt, synthetic construct
  source 1..23: mol_type = other RNA; note = RTT
gtgaggattgcagaatttgttca

SEQ ID NO: 496 - RNA, 24 nt, synthetic construct
  source 1..24: mol_type = other RNA; note = RTT
agtgaggattgcagaatttgttca

SEQ ID NO: 497 - RNA, 25 nt, synthetic construct
  source 1..25: mol_type = other RNA; note = RTT
gagtgaggattgcagaatttgttca

SEQ ID NO: 498 - RNA, 26 nt, synthetic construct
  source 1..26: mol_type = other RNA; note = RTT
agagtgaggattgcagaatttgttca

SEQ ID NO: 499 - RNA, 27 nt, synthetic construct
  source 1..27: mol_type = other RNA; note = RTT
cagagtgaggattgcagaatttgttca

SEQ ID NO: 500 - RNA, 28 nt, synthetic construct
  source 1..28: mol_type = other RNA; note = RTT
ccagagtgaggattgcagaatttgttca

SEQ ID NO: 501 - RNA, 29 nt, synthetic construct
  source 1..29: mol_type = other RNA; note = RTT
cccagagtgaggattgcagaatttgttca

SEQ ID NO: 502 - RNA, 30 nt, synthetic construct
  source 1..30: mol_type = other RNA; note = RTT
gcccagagtgaggattgcagaatttgttca

SEQ ID NO: 503 - RNA, 31 nt, synthetic construct
  source 1..31: mol_type = other RNA; note = RTT
tgcccagagtgaggattgcagaatttgttca

SEQ ID NO: 504 - RNA, 32 nt, synthetic construct
  source 1..32: mol_type = other RNA; note = RTT
ctgcccagagtgaggattgcagaatttgttca

SEQ ID NO: 505 - RNA, 33 nt, synthetic construct
  source 1..33: mol_type = other RNA; note = RTT
actgcccagagtgaggattgcagaatttgttca

SEQ ID NO: 506 - RNA, 34 nt, synthetic construct
  source 1..34: mol_type = other RNA; note = RTT
cactgcccagagtgaggattgcagaatttgttca

SEQ ID NO: 507 - RNA, 35 nt, synthetic construct
  source 1..35: mol_type = other RNA; note = RTT
acactgcccagagtgaggattgcagaatttgttca

SEQ ID NO: 508 - RNA, 36 nt, synthetic construct
  source 1..36: mol_type = other RNA; note = RTT
cacactgcccagagtgaggattgcagaatttgttca

SEQ ID NO: 509 - RNA, 37 nt, synthetic construct
  source 1..37: mol_type = other RNA; note = RTT
tcacactgcccagagtgaggattgcagaatttgttca

SEQ ID NO: 510 - RNA, 38 nt, synthetic construct
  source 1..38: mol_type = other RNA; note = RTT
ctcacactgcccagagtgaggattgcagaatttgttca

SEQ ID NO: 511 - RNA, 39 nt, synthetic construct
  source 1..39: mol_type = other RNA; note = RTT
actcacactgcccagagtgaggattgcagaatttgttca

SEQ ID NO: 512 - RNA, 40 nt, synthetic construct
  source 1..40: mol_type = other RNA; note = RTT (dual correction)
cactcacactgcccagagtgaggattgcagaatttgttca

SEQ ID NO: 513 - RNA, 17 nt, synthetic construct
  source 1..17: mol_type = other RNA; note = PEgRNA spacer (CTCAGT PAM)
cagtgtaacctccatgg

SEQ ID NO: 514 - RNA, 18 nt, synthetic construct
  source 1..18: mol_type = other RNA; note = PEgRNA spacer (CTCAGT PAM)
ccagtgtaacctccatgg

SEQ ID NO: 515 - RNA, 19 nt, synthetic construct
  source 1..19: mol_type = other RNA; note = PEgRNA spacer (CTCAGT PAM)
gccagtgtaacctccatgg

SEQ ID NO: 516 - RNA, 21 nt, synthetic construct
  source 1..21: mol_type = other RNA; note = PEgRNA spacer (CTCAGT PAM)
ctgccagtgtaacctccatgg

SEQ ID NO: 517 - RNA, 22 nt, synthetic construct
  source 1..22: mol_type = other RNA; note = PEgRNA spacer (CTCAGT PAM)
cctgccagtgtaacctccatgg

SEQ ID NO: 518-522 - skipped (5 entries)

SEQ ID NO: 523 - RNA, 10 nt, synthetic construct
  source 1..10: mol_type = other RNA; note = PBS
tggaggttac

SEQ ID NO: 524 - RNA, 11 nt, synthetic construct
  source 1..11: mol_type = other RNA; note = PBS
tggaggttaca

SEQ ID NO: 525 - RNA, 12 nt, synthetic construct
  source 1..12: mol_type = other RNA; note = PBS
tggaggttacac

SEQ ID NO: 526 - RNA, 13 nt, synthetic construct
  source 1..13: mol_type = other RNA; note = PBS
tggaggttacact

SEQ ID NO: 527 - RNA, 14 nt, synthetic construct
  source 1..14: mol_type = other RNA; note = PBS
tggaggttacactg

SEQ ID NO: 528 - RNA, 15 nt, synthetic construct
  source 1..15: mol_type = other RNA; note = PBS
tggaggttacactgg

SEQ ID NO: 529 - RNA, 16 nt, synthetic construct
  source 1..16: mol_type = other RNA; note = PBS
tggaggttacactggc

SEQ ID NO: 530 - RNA, 17 nt, synthetic construct
  source 1..17: mol_type = other RNA; note = PBS
tggaggttacactggca

SEQ ID NO: 531 - RNA, 18 nt, synthetic construct
  source 1..18: mol_type = other RNA; note = PBS
tggaggttacactggcag

SEQ ID NO: 532 - RNA, 19 nt, synthetic construct
  source 1..19: mol_type = other RNA; note = PBS
tggaggttacactggcagg

SEQ ID NO: 533 - RNA, 25 nt, synthetic construct
  source 1..25: mol_type = other RNA; note = RTT (CTCAGT-to-CAGTGT PAM silencing edit)
attgcagaatttgttcacactgcca

SEQ ID NO: 534 - RNA, 25 nt, synthetic construct
  source 1..25: mol_type = other RNA; note = RTT (CTCAGT-to-CTCTGT PAM silencing edit)
attgcagaatttgttcacagagcca

SEQ ID NO: 535 - RNA, 25 nt, synthetic construct
  source 1..25: mol_type = other RNA; note = RTT (CTCAGT-to-CAGCGT PAM silencing edit)
attgcagaatttgttcacgctgcca

SEQ ID NO: 536 - RNA, 25 nt, synthetic construct
  source 1..25: mol_type = other RNA; note = RTT (CTCAGT-to-CTCCGT PAM silencing edit)
attgcagaatttgttcacggagcca

SEQ ID NO: 537 - RNA, 25 nt, synthetic construct
  source 1..25: mol_type = other RNA; note = RTT
attgcagaatttgttcactgagcca

SEQ ID NO: 538 - RNA, 26 nt, synthetic construct
  source 1..26: mol_type = other RNA; note = RTT (CTCAGT-to-CAGTGT PAM silencing edit)
gattgcagaatttgttcacactgcca

SEQ ID NO: 539 - RNA, 26 nt, synthetic construct
  source 1..26: mol_type = other RNA; note = RTT (CTCAGT-to-CTCTGT PAM silencing edit)
gattgcagaatttgttcacagagcca

SEQ ID NO: 540 - RNA, 26 nt, synthetic construct
  source 1..26: mol_type = other RNA; note = RTT (CTCAGT-to-CAGCGT PAM silencing edit)
gattgcagaatttgttcacgctgcca

SEQ ID NO: 541 - RNA, 26 nt, synthetic construct
  source 1..26: mol_type = other RNA; note = RTT (CTCAGT-to-CTCCGT PAM silencing edit)
gattgcagaatttgttcacggagcca

SEQ ID NO: 542 - RNA, 26 nt, synthetic construct
  source 1..26: mol_type = other RNA; note = RTT
gattgcagaatttgttcactgagcca

SEQ ID NO: 543 - RNA, 27 nt, synthetic construct
  source 1..27: mol_type = other RNA; note = RTT (CTCAGT-to-CAGTGT PAM silencing edit)
ggattgcagaatttgttcacactgcca

SEQ ID NO: 544 - RNA, 27 nt, synthetic construct
  source 1..27: mol_type = other RNA; note = RTT (CTCAGT-to-CTCTGT PAM silencing edit)
ggattgcagaatttgttcacagagcca

SEQ ID NO: 545 - RNA, 27 nt, synthetic construct
  source 1..27: mol_type = other RNA; note = RTT (CTCAGT-to-CAGCGT PAM silencing edit)
ggattgcagaatttgttcacgctgcca

SEQ ID NO: 546 - RNA, 27 nt, synthetic construct
  source 1..27: mol_type = other RNA; note = RTT (CTCAGT-to-CTCCGT PAM silencing edit)
ggattgcagaatttgttcacggagcca

SEQ ID NO: 547 - RNA, 27 nt, synthetic construct
  source 1..27: mol_type = other RNA; note = RTT
ggattgcagaatttgttcactgagcca

SEQ ID NO: 548 - RNA, 28 nt, synthetic construct
  source 1..28: mol_type = other RNA; note = RTT (CTCAGT-to-CAGTGT PAM silencing edit)
aggattgcagaatttgttcacactgcca

SEQ ID NO: 549 - RNA, 28 nt, synthetic construct
  source 1..28: mol_type = other RNA; note = RTT (CTCAGT-to-CTCTGT PAM silencing edit)
aggattgcagaatttgttcacagagcca

SEQ ID NO: 550 - RNA, 28 nt, synthetic construct
  source 1..28: mol_type = other RNA; note = RTT (CTCAGT-to-CAGCGT PAM silencing edit)
aggattgcagaatttgttcacgctgcca

SEQ ID NO: 551 - RNA, 28 nt, synthetic construct
  source 1..28: mol_type = other RNA; note = RTT (CTCAGT-to-CTCCGT PAM silencing edit)
aggattgcagaatttgttcacggagcca

SEQ ID NO: 552 - RNA, 28 nt, synthetic construct
  source 1..28: mol_type = other RNA; note = RTT
aggattgcagaatttgttcactgagcca

SEQ ID NO: 553 - RNA, 29 nt, synthetic construct
  source 1..29: mol_type = other RNA; note = RTT (CTCAGT-to-CAGTGT PAM silencing edit)
gaggattgcagaatttgttcacactgcca

SEQ ID NO: 554 - RNA, 29 nt, synthetic construct
  source 1..29: mol_type = other RNA; note = RTT (CTCAGT-to-CTCTGT PAM silencing edit)
gaggattgcagaatttgttcacagagcca

SEQ ID NO: 555 - RNA, 29 nt, synthetic construct
  source 1..29: mol_type = other RNA; note = RTT (CTCAGT-to-CAGCGT PAM silencing edit)
gaggattgcagaatttgttcacgctgcca

SEQ ID NO: 556 - RNA, 29 nt, synthetic construct
  source 1..29: mol_type = other RNA; note = RTT (CTCAGT-to-CTCCGT PAM silencing edit)
gaggattgcagaatttgttcacggagcca

SEQ ID NO: 557 - RNA, 29 nt, synthetic construct
  source 1..29: mol_type = other RNA; note = RTT
gaggattgcagaatttgttcactgagcca

SEQ ID NO: 558 - RNA, 30 nt, synthetic construct
  source 1..30: mol_type = other RNA; note = RTT (CTCAGT-to-CAGTGT PAM silencing edit)
tgaggattgcagaatttgttcacactgcca

SEQ ID NO: 559 - RNA, 30 nt, synthetic construct
  source 1..30: mol_type = other RNA; note = RTT (CTCAGT-to-CTCTGT PAM silencing edit)
tgaggattgcagaatttgttcacagagcca

SEQ ID NO: 560 - RNA, 30 nt, synthetic construct
  source 1..30: mol_type = other RNA; note = RTT (CTCAGT-to-CAGCGT PAM silencing edit)
tgaggattgcagaatttgttcacgctgcca

SEQ ID NO: 561 - RNA, 30 nt, synthetic construct
  source 1..30: mol_type = other RNA; note = RTT (CTCAGT-to-CTCCGT PAM silencing edit)
tgaggattgcagaatttgttcacggagcca

SEQ ID NO: 562 - RNA, 30 nt, synthetic construct
  source 1..30: mol_type = other RNA; note = RTT
tgaggattgcagaatttgttcactgagcca

SEQ ID NO: 563 - RNA, 31 nt, synthetic construct
  source 1..31: mol_type = other RNA; note = RTT (CTCAGT-to-CAGTGT PAM silencing edit)
gtgaggattgcagaatttgttcacactgcca

SEQ ID NO: 564 - RNA, 31 nt, synthetic construct
  source 1..31: mol_type = other RNA; note = RTT (CTCAGT-to-CTCTGT PAM silencing edit)
gtgaggattgcagaatttgttcacagagcca

SEQ ID NO: 565 - RNA, 31 nt, synthetic construct
  source 1..31: mol_type = other RNA; note = RTT (CTCAGT-to-CAGCGT PAM silencing edit)
gtgaggattgcagaatttgttcacgctgcca

SEQ ID NO: 566 - RNA, 31 nt, synthetic construct
  source 1..31: mol_type = other RNA; note = RTT (CTCAGT-to-CTCCGT PAM silencing edit)
gtgaggattgcagaatttgttcacggagcca

SEQ ID NO: 567 - RNA, 31 nt, synthetic construct
  source 1..31: mol_type = other RNA; note = RTT
gtgaggattgcagaatttgttcactgagcca

SEQ ID NO: 568 - RNA, 32 nt, synthetic construct
  source 1..32: mol_type = other RNA; note = RTT (CTCAGT-to-CAGTGT PAM silencing edit)
agtgaggattgcagaatttgttcacactgcca

SEQ ID NO: 569 - RNA, 32 nt, synthetic construct
  source 1..32: mol_type = other RNA; note = RTT (CTCAGT-to-CTCTGT PAM silencing edit)
agtgaggattgcagaatttgttcacagagcca

SEQ ID NO: 570 - RNA, 32 nt, synthetic construct
  source 1..32: mol_type = other RNA; note = RTT (CTCAGT-to-CAGCGT PAM silencing edit)
agtgaggattgcagaatttgttcacgctgcca

SEQ ID NO: 571 - RNA, 32 nt, synthetic construct
  source 1..32: mol_type = other RNA; note = RTT (CTCAGT-to-CTCCGT PAM silencing edit)
agtgaggattgcagaatttgttcacggagcca

SEQ ID NO: 572 - RNA, 32 nt, synthetic construct
  source 1..32: mol_type = other RNA; note = RTT
agtgaggattgcagaatttgttcactgagcca

SEQ ID NO: 573 - RNA, 33 nt, synthetic construct
  source 1..33: mol_type = other RNA; note = RTT (CTCAGT-to-CAGTGT PAM silencing edit)
gagtgaggattgcagaatttgttcacactgcca

SEQ ID NO: 574 - RNA, 33 nt, synthetic construct
  source 1..33: mol_type = other RNA; note = RTT (CTCAGT-to-CTCTGT PAM silencing edit)
gagtgaggattgcagaatttgttcacagagcca

SEQ ID NO: 575 - RNA, 33 nt, synthetic construct
  source 1..33: mol_type = other RNA; note = RTT (CTCAGT-to-CAGCGT PAM silencing edit)
gagtgaggattgcagaatttgttcacgctgcca

SEQ ID NO: 576 - RNA, 33 nt, synthetic construct
  source 1..33: mol_type = other RNA; note = RTT (CTCAGT-to-CTCCGT PAM silencing edit)
gagtgaggattgcagaatttgttcacggagcca

SEQ ID NO: 577 - RNA, 33 nt, synthetic construct
  source 1..33: mol_type = other RNA; note = RTT
gagtgaggattgcagaatttgttcactgagcca

SEQ ID NO: 578 - RNA, 34 nt, synthetic construct
  source 1..34: mol_type = other RNA; note = RTT (CTCAGT-to-CAGTGT PAM silencing edit)
agagtgaggattgcagaatttgttcacactgcca

SEQ ID NO: 579 - RNA, 34 nt, synthetic construct
  source 1..34: mol_type = other RNA; note = RTT (CTCAGT-to-CTCTGT PAM silencing edit)
agagtgaggattgcagaatttgttcacagagcca

SEQ ID NO: 580 - RNA, 34 nt, synthetic construct
  source 1..34: mol_type = other RNA; note = RTT (CTCAGT-to-CAGCGT PAM silencing edit)
agagtgaggattgcagaatttgttcacgctgcca

SEQ ID NO: 581 - RNA, 34 nt, synthetic construct
  source 1..34: mol_type = other RNA; note = RTT (CTCAGT-to-CTCCGT PAM silencing edit)
agagtgaggattgcagaatttgttcacggagcca

SEQ ID NO: 582 - RNA, 34 nt, synthetic construct
  source 1..34: mol_type = other RNA; note = RTT
agagtgaggattgcagaatttgttcactgagcca

SEQ ID NO: 583 - RNA, 35 nt, synthetic construct
  source 1..35: mol_type = other RNA; note = RTT (CTCAGT-to-CAGTGT PAM silencing edit)
cagagtgaggattgcagaatttgttcacactgcca

SEQ ID NO: 584 - RNA, 35 nt, synthetic construct
  source 1..35: mol_type = other RNA; note = RTT (CTCAGT-to-CTCTGT PAM silencing edit)
cagagtgaggattgcagaatttgttcacagagcca

SEQ ID NO: 585 - RNA, 35 nt, synthetic construct
  source 1..35: mol_type = other RNA; note = RTT (CTCAGT-to-CAGCGT PAM silencing edit)
cagagtgaggattgcagaatttgttcacgctgcca

SEQ ID NO: 586 - RNA, 35 nt, synthetic construct
  source 1..35: mol_type = other RNA; note = RTT (CTCAGT-to-CTCCGT PAM silencing edit)
cagagtgaggattgcagaatttgttcacggagcca

SEQ ID NO: 587 - RNA, 35 nt, synthetic construct
  source 1..35: mol_type = other RNA; note = RTT
cagagtgaggattgcagaatttgttcactgagcca

SEQ ID NO: 588 - RNA, 36 nt, synthetic construct
  source 1..36: mol_type = other RNA; note = RTT (CTCAGT-to-CAGTGT PAM silencing edit)
ccagagtgaggattgcagaatttgttcacactgcca

SEQ ID NO: 589 - RNA, 36 nt, synthetic construct
  source 1..36: mol_type = other RNA; note = RTT (CTCAGT-to-CTCTGT PAM silencing edit)
ccagagtgaggattgcagaatttgttcacagagcca

SEQ ID NO: 590 - RNA, 36 nt, synthetic construct
  source 1..36: mol_type = other RNA; note = RTT (CTCAGT-to-CAGCGT PAM silencing edit)
ccagagtgaggattgcagaatttgttcacgctgcca

SEQ ID NO: 591 - RNA, 36 nt, synthetic construct
  source 1..36: mol_type = other RNA; note = RTT (CTCAGT-to-CTCCGT PAM silencing edit)
ccagagtgaggattgcagaatttgttcacggagcca

SEQ ID NO: 592 - RNA, 36 nt, synthetic construct
  source 1..36: mol_type = other RNA; note = RTT
ccagagtgaggattgcagaatttgttcactgagcca

SEQ ID NO: 593 - RNA, 37 nt, synthetic construct
  source 1..37: mol_type = other RNA; note = RTT (CTCAGT-to-CAGTGT PAM silencing edit)
cccagagtgaggattgcagaatttgttcacactgcca

SEQ ID NO: 594 - RNA, 37 nt, synthetic construct
  source 1..37: mol_type = other RNA; note = RTT (CTCAGT-to-CTCTGT PAM silencing edit)
cccagagtgaggattgcagaatttgttcacagagcca

SEQ ID NO: 595 - RNA, 37 nt, synthetic construct
  source 1..37: mol_type = other RNA; note = RTT (CTCAGT-to-CAGCGT PAM silencing edit)
cccagagtgaggattgcagaatttgttcacgctgcca

SEQ ID NO: 596 - RNA, 37 nt, synthetic construct
  source 1..37: mol_type = other RNA; note = RTT (CTCAGT-to-CTCCGT PAM silencing edit)
cccagagtgaggattgcagaatttgttcacggagcca

SEQ ID NO: 597 - RNA, 37 nt, synthetic construct
  source 1..37: mol_type = other RNA; note = RTT
cccagagtgaggattgcagaatttgttcactgagcca

SEQ ID NO: 598 - RNA, 38 nt, synthetic construct
  source 1..38: mol_type = other RNA; note = RTT (CTCAGT-to-CAGTGT PAM silencing edit)
gcccagagtgaggattgcagaatttgttcacactgcca

SEQ ID NO: 599 - RNA, 38 nt, synthetic construct
  source 1..38: mol_type = other RNA; note = RTT (CTCAGT-to-CTCTGT PAM silencing edit)
gcccagagtgaggattgcagaatttgttcacagagcca

SEQ ID NO: 600 - RNA, 38 nt, synthetic construct
  source 1..38: mol_type = other RNA; note = RTT (CTCAGT-to-CAGCGT PAM silencing edit)
gcccagagtgaggattgcagaatttgttcacgctgcca

SEQ ID NO: 601 - RNA, 38 nt, synthetic construct
  source 1..38: mol_type = other RNA; note = RTT (CTCAGT-to-CTCCGT PAM silencing edit)
gcccagagtgaggattgcagaatttgttcacggagcca

SEQ ID NO: 602 - RNA, 38 nt, synthetic construct
  source 1..38: mol_type = other RNA; note = RTT
gcccagagtgaggattgcagaatttgttcactgagcca

SEQ ID NO: 603 - RNA, 39 nt, synthetic construct
  source 1..39: mol_type = other RNA; note = RTT (CTCAGT-to-CAGTGT PAM silencing edit)
tgcccagagtgaggattgcagaatttgttcacactgcca

SEQ ID NO: 604 - RNA, 39 nt, synthetic construct
  source 1..39: mol_type = other RNA; note = RTT (CTCAGT-to-CTCTGT PAM silencing edit)
tgcccagagtgaggattgcagaatttgttcacagagcca

SEQ ID NO: 605 - RNA, 39 nt, synthetic construct
  source 1..39: mol_type = other RNA; note = RTT (CTCAGT-to-CAGCGT PAM silencing edit)
tgcccagagtgaggattgcagaatttgttcacgctgcca

SEQ ID NO: 606 - RNA, 39 nt, synthetic construct
  source 1..39: mol_type = other RNA; note = RTT (CTCAGT-to-CTCCGT PAM silencing edit)
tgcccagagtgaggattgcagaatttgttcacggagcca

SEQ ID NO: 607 - RNA, 39 nt, synthetic construct
  source 1..39: mol_type = other RNA; note = RTT
tgcccagagtgaggattgcagaatttgttcactgagcca

SEQ ID NO: 608 - RNA, 40 nt, synthetic construct
  source 1..40: mol_type = other RNA; note = RTT (CTCAGT-to-CAGTGT PAM silencing edit)
ctgcccagagtgaggattgcagaatttgttcacactgcca

SEQ ID NO: 609 - RNA, 40 nt, synthetic construct
  source 1..40: mol_type = other RNA; note = RTT (CTCAGT-to-CTCTGT PAM silencing edit)
ctgcccagagtgaggattgcagaatttgttcacagagcca

SEQ ID NO: 610 - RNA, 40 nt, synthetic construct
  source 1..40: mol_type = other RNA; note = RTT (CTCAGT-to-CAGCGT PAM silencing edit)
ctgcccagagtgaggattgcagaatttgttcacgctgcca

SEQ ID NO: 611 - RNA, 40 nt, synthetic construct
  source 1..40: mol_type = other RNA; note = RTT (CTCAGT-to-CTCCGT PAM silencing edit)
ctgcccagagtgaggattgcagaatttgttcacggagcca

SEQ ID NO: 612 - RNA, 40 nt, synthetic construct
  source 1..40: mol_type = other RNA; note = RTT
ctgcccagagtgaggattgcagaatttgttcactgagcca

SEQ ID NO: 613 - RNA, 20 nt, synthetic construct
  source 1..20: mol_type = other RNA; note = PE3 ngRNA spacer (GGAGGT PAM)
gaatttgttcacactgccat

SEQ ID NO: 614 - RNA, 20 nt, synthetic construct
  source 1..20: mol_type = other RNA; note = PE3 ngRNA spacer (GGAGGT PAM)
gaatttgttcacagagccat

SEQ ID NO: 615 - RNA, 20 nt, synthetic construct
  source 1..20: mol_type = other RNA; note = PE3 ngRNA spacer (GGAGGT PAM)
gaatttgttcacgctgccat

SEQ ID NO: 616 - RNA, 20 nt, synthetic construct
  source 1..20: mol_type = other RNA; note = PE3 ngRNA spacer (GGAGGT PAM)
gaatttgttcacggagccat

SEQ ID NO: 617 - RNA, 20 nt, synthetic construct
  source 1..20: mol_type = other RNA; note = PE3 ngRNA spacer (GGAGGT PAM)
gaatttgttcactgagccat

SEQ ID NO: 618 - RNA, 17 nt, synthetic construct
  source 1..17: mol_type = other RNA; note = PEgRNA spacer (TAG PAM)
cctcactctgggcagtg

SEQ ID NO: 619 - RNA, 21 nt, synthetic construct
  source 1..21: mol_type = other RNA; note = PEgRNA spacer (TAG PAM)
caatcctcactctgggcagtg

SEQ ID NO: 620 - RNA, 22 nt, synthetic construct
  source 1..22: mol_type = other RNA; note = PEgRNA spacer (TAG PAM)
gcaatcctcactctgggcagtg

SEQ ID NO: 621-625 - skipped (5 entries)

SEQ ID NO: 626 - RNA, 10 nt, synthetic construct
  source 1..10: mol_type = other RNA; note = PBS
tgcccagagt

SEQ ID NO: 627 - RNA, 11 nt, synthetic construct
  source 1..11: mol_type = other RNA; note = PBS
tgcccagagtg

SEQ ID NO: 628 - RNA, 12 nt, synthetic construct
  source 1..12: mol_type = other RNA; note = PBS
tgcccagagtga

SEQ ID NO: 629 - RNA, 13 nt, synthetic construct
  source 1..13: mol_type = other RNA; note = PBS
tgcccagagtgag

SEQ ID NO: 630 - RNA, 14 nt, synthetic construct
  source 1..14: mol_type = other RNA; note = PBS
tgcccagagtgagg

SEQ ID NO: 631 - RNA, 15 nt, synthetic construct
  source 1..15: mol_type = other RNA; note = PBS
tgcccagagtgagga

SEQ ID NO: 632 - RNA, 16 nt, synthetic construct
  source 1..16: mol_type = other RNA; note = PBS
tgcccagagtgaggat

SEQ ID NO: 633 - RNA, 17 nt, synthetic construct
  source 1..17: mol_type = other RNA; note = PBS
tgcccagagtgaggatt

SEQ ID NO: 634 - RNA, 19 nt, synthetic construct
  source 1..19: mol_type = other RNA; note = PBS
tgcccagagtgaggattgc

SEQ ID NO: 635 - skipped

SEQ ID NO: 636 - RNA, 10 nt, synthetic construct
  source 1..10: mol_type = other RNA; note = RTT
gcactcacac

SEQ ID NO: 637 - RNA, 11 nt, synthetic construct
  source 1..11: mol_type = other RNA; note = RTT
tgcactcacac

SEQ ID NO: 638 - RNA, 12 nt, synthetic construct
  source 1..12: mol_type = other RNA; note = RTT
ttgcactcacac

SEQ ID NO: 639 - RNA, 13 nt, synthetic construct
  source 1..13: mol_type = other RNA; note = RTT
tttgcactcacac

SEQ ID NO: 640 - RNA, 14 nt, synthetic construct
  source 1..14: mol_type = other RNA; note = RTT
ttttgcactcacac

SEQ ID NO: 641 - RNA, 15 nt, synthetic construct
  source 1..15: mol_type = other RNA; note = RTT
tttttgcactcacac

SEQ ID NO: 642 - RNA, 16 nt, synthetic construct
  source 1..16: mol_type = other RNA; note = RTT
ttttttgcactcacac

SEQ ID NO: 643 - RNA, 17 nt, synthetic construct
  source 1..17: mol_type = other RNA; note = RTT
cttttttgcactcacac

SEQ ID NO: 644 - RNA, 18 nt, synthetic construct
  source 1..18: mol_type = other RNA; note = RTT
tcttttttgcactcacac

SEQ ID NO: 645 - RNA, 19 nt, synthetic construct
  source 1..19: mol_type = other RNA; note = RTT
ttcttttttgcactcacac

SEQ ID NO: 646 - RNA, 20 nt, synthetic construct
  source 1..20: mol_type = other RNA; note = RTT
cttcttttttgcactcacac

SEQ ID NO: 647 - RNA, 21 nt, synthetic construct
  source 1..21: mol_type = other RNA; note = RTT
gcttcttttttgcactcacac

SEQ ID NO: 648 - RNA, 22 nt, synthetic construct
  source 1..22: mol_type = other RNA; note = RTT
ggcttcttttttgcactcacac

SEQ ID NO: 649 - RNA, 23 nt, synthetic construct
  source 1..23: mol_type = other RNA; note = RTT
tggcttcttttttgcactcacac

SEQ ID NO: 650 - RNA, 24 nt, synthetic construct
  source 1..24: mol_type = other RNA; note = RTT
ttggcttcttttttgcactcacac

SEQ ID NO: 651 - RNA, 25 nt, synthetic construct
  source 1..25: mol_type = other RNA; note = RTT
tttggcttcttttttgcactcacac

SEQ ID NO: 652 - RNA, 26 nt, synthetic construct
  source 1..26: mol_type = other RNA; note = RTT
ctttggcttcttttttgcactcacac

SEQ ID NO: 653 - RNA, 27 nt, synthetic construct
  source 1..27: mol_type = other RNA; note = RTT
cctttggcttcttttttgcactcacac

SEQ ID NO: 654 - RNA, 28 nt, synthetic construct
  source 1..28: mol_type = other RNA; note = RTT
tcctttggcttcttttttgcactcacac

SEQ ID NO: 655 - RNA, 29 nt, synthetic construct
  source 1..29: mol_type = other RNA; note = RTT
gtcctttggcttcttttttgcactcacac

SEQ ID NO: 656 - RNA, 30 nt, synthetic construct
  source 1..30: mol_type = other RNA; note = RTT
agtcctttggcttcttttttgcactcacac

SEQ ID NO: 657 - RNA, 31 nt, synthetic construct
  source 1..31: mol_type = other RNA; note = RTT
aagtcctttggcttcttttttgcactcacac

SEQ ID NO: 658 - RNA, 32 nt, synthetic construct
  source 1..32: mol_type = other RNA; note = RTT
gaagtcctttggcttcttttttgcactcacac

SEQ ID NO: 659 - RNA, 33 nt, synthetic construct
  source 1..33: mol_type = other RNA; note = RTT
tgaagtcctttggcttcttttttgcactcacac

SEQ ID NO: 660 - RNA, 34 nt, synthetic construct
  source 1..34: mol_type = other RNA; note = RTT
ctgaagtcctttggcttcttttttgcactcacac

SEQ ID NO: 661 - RNA, 35 nt, synthetic construct
  source 1..35: mol_type = other RNA; note = RTT
actgaagtcctttggcttcttttttgcactcacac

SEQ ID NO: 662 - RNA, 36 nt, synthetic construct
  source 1..36: mol_type = other RNA; note = RTT
cactgaagtcctttggcttcttttttgcactcacac

SEQ ID NO: 663 - RNA, 37 nt, synthetic construct
  source 1..37: mol_type = other RNA; note = RTT
acactgaagtcctttggcttcttttttgcactcacac

SEQ ID NO: 664 - RNA, 38 nt, synthetic construct
  source 1..38: mol_type = other RNA; note = RTT
cacactgaagtcctttggcttcttttttgcactcacac

SEQ ID NO: 665 - RNA, 39 nt, synthetic construct
  source 1..39: mol_type = other RNA; note = RTT
tcacactgaagtcctttggcttcttttttgcactcacac

SEQ ID NO: 666 - RNA, 40 nt, synthetic construct
  source 1..40: mol_type = other RNA; note = RTT
gtcacactgaagtcctttggcttcttttttgcactcacac

SEQ ID NO: 667 - RNA, 20 nt, synthetic construct
  source 1..20: mol_type = other RNA; note = PE3 ngRNA spacer (CAG PAM)
acccataaaagttttctctg

SEQ ID NO: 668 - RNA, 20 nt, synthetic construct
  source 1..20: mol_type = other RNA; note = PE3 ngRNA spacer (AAG PAM)
tctctgcaggtgtcacactg

SEQ ID NO: 669 - RNA, 20 nt, synthetic construct
  source 1..20: mol_type = other RNA; note = PE3 ngRNA spacer (AAG PAM)
tggtgacatctaacccataa

SEQ ID NO: 670 - RNA, 11 nt, synthetic construct
  source 1..11: mol_type = other RNA; note = RTT*1,2,4
tgagtgcaaaa

SEQ ID NO: 671 - RNA, 12 nt, synthetic construct
  source 1..12: mol_type = other RNA; note = RTT*1,2,4
gtgagtgcaaaa

SEQ ID NO: 672 - RNA, 13 nt, synthetic construct
  source 1..13: mol_type = other RNA; note = RTT*1,2,4
tgtgagtgcaaaa

SEQ ID NO: 673 - RNA, 14 nt, synthetic construct
  source 1..14: mol_type = other RNA; note = RTT*1,2,4
gtgtgagtgcaaaa

SEQ ID NO: 674 - RNA, 14 nt, synthetic construct
  source 1..14: mol_type = other RNA; note = RTT*1,3,4 (TG-to-TA PAM silencing edit)
gtgtgagtgtaaaa

SEQ ID NO: 675 - RNA, 15 nt, synthetic construct
  source 1..15: mol_type = other RNA; note = RTT*1,2,4
agtgtgagtgcaaaa

SEQ ID NO: 676 - RNA, 15 nt, synthetic construct
  source 1..15: mol_type = other RNA; note = RTT*1,3,4 (TG-to-TA PAM silencing edit)
agtgtgagtgtaaaa

SEQ ID NO: 677 - RNA, 16 nt, synthetic construct
  source 1..16: mol_type = other RNA; note = RTT*1,2,4
cagtgtgagtgcaaaa

SEQ ID NO: 678 - RNA, 16 nt, synthetic construct
  source 1..16: mol_type = other RNA; note = RTT*1,3,4 (TG-to-TA PAM silencing edit)
cagtgtgagtgtaaaa

SEQ ID NO: 679 - RNA, 17 nt, synthetic construct
  source 1..17: mol_type = other RNA; note = RTT*1,2,4
gcagtgtgagtgcaaaa

SEQ ID NO: 680 - RNA, 17 nt, synthetic construct
  source 1..17: mol_type = other RNA; note = RTT*1,3,4 (TG-to-TA PAM silencing edit)
gcagtgtgagtgtaaaa

SEQ ID NO: 681 - RNA, 18 nt, synthetic construct
  source 1..18: mol_type = other RNA; note = RTT*1,2,4
ggcagtgtgagtgcaaaa

SEQ ID NO: 682 - RNA, 18 nt, synthetic construct
  source 1..18: mol_type = other RNA; note = RTT*1,3,4 (TG-to-TA PAM silencing edit)
ggcagtgtgagtgtaaaa

SEQ ID NO: 683 - RNA, 19 nt, synthetic construct
  source 1..19: mol_type = other RNA; note = RTT*1,2,4
gggcagtgtgagtgcaaaa

SEQ ID NO: 684 - RNA, 19 nt, synthetic construct
  source 1..19: mol_type = other RNA; note = RTT*1,3,4 (TG-to-TA PAM silencing edit)
gggcagtgtgagtgtaaaa

SEQ ID NO: 685 - RNA, 20 nt, synthetic construct
  source 1..20: mol_type = other RNA; note = RTT*1,2,4
tgggcagtgtgagtgcaaaa

SEQ ID NO: 686 - RNA, 20 nt, synthetic construct
  source 1..20: mol_type = other RNA; note = RTT*1,3,4 (TG-to-TA PAM silencing edit)
tgggcagtgtgagtgtaaaa

SEQ ID NO: 687 - RNA, 21 nt, synthetic construct
  source 1..21: mol_type = other RNA; note = RTT*1,2,4
ctgggcagtgtgagtgcaaaa

SEQ ID NO: 688 - RNA, 21 nt, synthetic construct
  source 1..21: mol_type = other RNA; note = RTT*1,3,4 (TG-to-TA PAM silencing edit)
ctgggcagtgtgagtgtaaaa

SEQ ID NO: 689 - RNA, 22 nt, synthetic construct
  source 1..22: mol_type = other RNA; note = RTT*1,2,4
tctgggcagtgtgagtgcaaaa

SEQ ID NO: 690 - RNA, 22 nt, synthetic construct
  source 1..22: mol_type = other RNA; note = RTT*1,3,4 (TG-to-TA PAM silencing edit)
tctgggcagtgtgagtgtaaaa

SEQ ID NO: 691 - RNA, 23 nt, synthetic construct
  source 1..23: mol_type = other RNA; note = RTT*1,2,4
ctctgggcagtgtgagtgcaaaa

SEQ ID NO: 692 - RNA, 23 nt, synthetic construct
  source 1..23: mol_type = other RNA; note = RTT*1,3,4 (TG-to-TA PAM silencing edit)
ctctgggcagtgtgagtgtaaaa

SEQ ID NO: 693 - RNA, 24 nt, synthetic construct
  source 1..24: mol_type = other RNA; note = RTT*1,2,4
actctgggcagtgtgagtgcaaaa

SEQ ID NO: 694 - RNA, 24 nt, synthetic construct
  source 1..24: mol_type = other RNA; note = RTT*1,3,4 (TG-to-TA PAM silencing edit)
actctgggcagtgtgagtgtaaaa

SEQ ID NO: 695 - RNA, 25 nt, synthetic construct
  source 1..25: mol_type = other RNA; note = RTT*1,2,4
cactctgggcagtgtgagtgcaaaa

SEQ ID NO: 696 - RNA, 25 nt, synthetic construct
  source 1..25: mol_type = other RNA; note = RTT*1,3,4 (TG-to-TA PAM silencing edit)
cactctgggcagtgtgagtgtaaaa

SEQ ID NO: 697 - RNA, 26 nt, synthetic construct
  source 1..26: mol_type = other RNA; note = RTT*1,2,4
tcactctgggcagtgtgagtgcaaaa

SEQ ID NO: 698 - RNA, 26 nt, synthetic construct
  source 1..26: mol_type = other RNA; note = RTT*1,3,4 (TG-to-TA PAM silencing edit)
tcactctgggcagtgtgagtgtaaaa

SEQ ID NO: 699 - RNA, 27 nt, synthetic construct
  source 1..27: mol_type = other RNA; note = RTT*1,2,4
ctcactctgggcagtgtgagtgcaaaa

SEQ ID NO: 700 - RNA, 27 nt, synthetic construct
  source 1..27: mol_type = other RNA; note = RTT*1,3,4 (TG-to-TA PAM silencing edit)
ctcactctgggcagtgtgagtgtaaaa

SEQ ID NO: 701 - RNA, 28 nt, synthetic construct
  source 1..28: mol_type = other RNA; note = RTT*1,2,4
cctcactctgggcagtgtgagtgcaaaa

SEQ ID NO: 702 - RNA, 28 nt, synthetic construct
  source 1..28: mol_type = other RNA; note = RTT*1,3,4 (TG-to-TA PAM silencing edit)
cctcactctgggcagtgtgagtgtaaaa

SEQ ID NO: 703 - RNA, 29 nt, synthetic construct
  source 1..29: mol_type = other RNA; note = RTT*1,2,4
tcctcactctgggcagtgtgagtgcaaaa

SEQ ID NO: 704 - RNA, 29 nt, synthetic construct
  source 1..29: mol_type = other RNA; note = RTT*1,3,4 (TG-to-TA PAM silencing edit)
tcctcactctgggcagtgtgagtgtaaaa

SEQ ID NO: 705 - RNA, 30 nt, synthetic construct
  source 1..30: mol_type = other RNA; note = RTT*1,2,4
atcctcactctgggcagtgtgagtgcaaaa

SEQ ID NO: 706 - RNA, 30 nt, synthetic construct
  source 1..30: mol_type = other RNA; note = RTT*1,3,4 (TG-to-TA PAM silencing edit)
atcctcactctgggcagtgtgagtgtaaaa

SEQ ID NO: 707 - RNA, 31 nt, synthetic construct
  source 1..31: mol_type = other RNA; note = RTT*1,2,4
aatcctcactctgggcagtgtgagtgcaaaa

SEQ ID NO: 708 - RNA, 31 nt, synthetic construct
  source 1..31: mol_type = other RNA; note = RTT*1,3,4 (TG-to-TA PAM silencing edit)
aatcctcactctgggcagtgtgagtgtaaaa

SEQ ID NO: 709 - RNA, 32 nt, synthetic construct
  source 1..32: mol_type = other RNA; note = RTT*1,2,4
caatcctcactctgggcagtgtgagtgcaaaa

SEQ ID NO: 710 - RNA, 32 nt, synthetic construct
  source 1..32: mol_type = other RNA; note = RTT*1,3,4 (TG-to-TA PAM silencing edit)
caatcctcactctgggcagtgtgagtgtaaaa

SEQ ID NO: 711 - RNA, 33 nt, synthetic construct
  source 1..33: mol_type = other RNA; note = RTT*1,2,4
gcaatcctcactctgggcagtgtgagtgcaaaa

SEQ ID NO: 712 - RNA, 33 nt, synthetic construct
  source 1..33: mol_type = other RNA; note = RTT*1,3,4 (TG-to-TA PAM silencing edit)
gcaatcctcactctgggcagtgtgagtgtaaaa

SEQ ID NO: 713 - RNA, 34 nt, synthetic construct
  source 1..34: mol_type = other RNA; note = RTT*1,2,4
tgcaatcctcactctgggcagtgtgagtgcaaaa

SEQ ID NO: 714 - RNA, 34 nt, synthetic construct
  source 1..34: mol_type = other RNA; note = RTT*1,3,4 (TG-to-TA PAM silencing edit)
tgcaatcctcactctgggcagtgtgagtgtaaaa

SEQ ID NO: 715 - RNA, 35 nt, synthetic construct
  source 1..35: mol_type = other RNA; note = RTT*1,2,4
ctgcaatcctcactctgggcagtgtgagtgcaaaa

SEQ ID NO: 716 - RNA, 35 nt, synthetic construct
  source 1..35: mol_type = other RNA; note = RTT*1,3,4 (TG-to-TA PAM silencing edit)
ctgcaatcctcactctgggcagtgtgagtgtaaaa

SEQ ID NO: 717 - RNA, 36 nt, synthetic construct
  source 1..36: mol_type = other RNA; note = RTT*1,2,4
tctgcaatcctcactctgggcagtgtgagtgcaaaa

SEQ ID NO: 718 - RNA, 36 nt, synthetic construct
  source 1..36: mol_type = other RNA; note = RTT*1,3,4 (TG-to-TA PAM silencing edit)
tctgcaatcctcactctgggcagtgtgagtgtaaaa

SEQ ID NO: 719-723 - skipped (5 entries)

SEQ ID NO: 724 - RNA, 10 nt, synthetic construct
  source 1..10: mol_type = other RNA; note = PBS
gggctcacat

SEQ ID NO: 725 - RNA, 11 nt, synthetic construct
  source 1..11: mol_type = other RNA; note = PBS
gggctcacatc

SEQ ID NO: 726 - RNA, 12 nt, synthetic construct
  source 1..12: mol_type = other RNA; note = PBS
gggctcacatcc

SEQ ID NO: 727 - RNA, 13 nt, synthetic construct
  source 1..13: mol_type = other RNA; note = PBS
gggctcacatcca

SEQ ID NO: 728 - RNA, 14 nt, synthetic construct
  source 1..14: mol_type = other RNA; note = PBS
gggctcacatccaa

SEQ ID NO: 729 - RNA, 15 nt, synthetic construct
  source 1..15: mol_type = other RNA; note = PBS
gggctcacatccaac

SEQ ID NO: 730 - RNA, 16 nt, synthetic construct
  source 1..16: mol_type = other RNA; note = PBS
gggctcacatccaaca

SEQ ID NO: 731 - RNA, 17 nt, synthetic construct
  source 1..17: mol_type = other RNA; note = PBS
gggctcacatccaacat

SEQ ID NO: 732 - RNA, 18 nt, synthetic construct
  source 1..18: mol_type = other RNA; note = PBS
gggctcacatccaacatc

SEQ ID NO: 733 - RNA, 19 nt, synthetic construct
  source 1..19: mol_type = other RNA; note = PBS
gggctcacatccaacatca

SEQ ID NO: 734 - RNA, 17 nt, synthetic construct
  source 1..17: mol_type = other RNA; note = PEgRNA spacer (CAG PAM)
ttggatgtgagccctgc

SEQ ID NO: 735 - RNA, 18 nt, synthetic construct
  source 1..18: mol_type = other RNA; note = PEgRNA spacer (CAG PAM)
gttggatgtgagccctgc

SEQ ID NO: 736 - RNA, 19 nt, synthetic construct
  source 1..19: mol_type = other RNA; note = PEgRNA spacer (CAG PAM)
tgttggatgtgagccctgc

SEQ ID NO: 737 - RNA, 21 nt, synthetic construct
  source 1..21: mol_type = other RNA; note = PEgRNA spacer (CAG PAM)
gatgttggatgtgagccctgc

SEQ ID NO: 738 - RNA, 22 nt, synthetic construct
  source 1..22: mol_type = other RNA; note = PEgRNA spacer (CAG PAM)
tgatgttggatgtgagccctgc

SEQ ID NO: 739 - RNA, 39 nt, synthetic construct
  source 1..39: mol_type = other RNA; note = RTT
gcagaatttgttcactgagccatggaggttacactggca

SEQ ID NO: 740 - RNA, 39 nt, synthetic construct
  source 1..39: mol_type = other RNA; note = RTT (CAG-to-CAA PAM silencing edit)
gcagaatttgttcactgagccatggaggttacattggca

SEQ ID NO: 741 - RNA, 40 nt, synthetic construct
  source 1..40: mol_type = other RNA; note = RTT
tgcagaatttgttcactgagccatggaggttacactggca

SEQ ID NO: 742 - RNA, 40 nt, synthetic construct
  source 1..40: mol_type = other RNA; note = RTT (CAG-to-CAA PAM silencing edit)
tgcagaatttgttcactgagccatggaggttacattggca

SEQ ID NO: 743 - RNA, 20 nt, synthetic construct
  source 1..20: mol_type = other RNA; note = PE3 ngRNA spacer (GAG PAM)
aatttgttcactgagccatg

SEQ ID NO: 744 - RNA, 20 nt, synthetic construct
  source 1..20: mol_type = other RNA; note = PE3 ngRNA spacer (CAG PAM)
agccatggaggttacactgg

SEQ ID NO: 745 - RNA, 20 nt, synthetic construct
  source 1..20: mol_type = other RNA; note = PE3 ngRNA spacer (CAG PAM)
agccatggaggttacattgg

SEQ ID NO: 746 - RNA, 20 nt, synthetic construct
  source 1..20: mol_type = other RNA; note = PE3b ngRNA spacer (GAG PAM)
gattgcagaatttgttcact

SEQ ID NO: 747 - RNA, 20 nt, synthetic construct
  source 1..20: mol_type = other RNA; note = PE3b*1 ngRNA spacer (GAG PAM)
ttttgcactcacactgccca

SEQ ID NO: 748-752 - skipped (5 entries)

SEQ ID NO: 753 - RNA, 10 nt, synthetic construct
  source 1..10: mol_type = other RNA; note = PBS
catggaggtt

SEQ ID NO: 754 - RNA, 11 nt, synthetic construct
  source 1..11: mol_type = other RNA; note = PBS
catggaggtta

SEQ ID NO: 755 - RNA, 12 nt, synthetic construct
  source 1..12: mol_type = other RNA; note = PBS
catggaggttac

SEQ ID NO: 756 - RNA, 13 nt, synthetic construct
  source 1..13: mol_type = other RNA; note = PBS
catggaggttaca

SEQ ID NO: 757 - RNA, 14 nt, synthetic construct
  source 1..14: mol_type = other RNA; note = PBS
catggaggttacac

SEQ ID NO: 758 - RNA, 15 nt, synthetic construct
  source 1..15: mol_type = other RNA; note = PBS
catggaggttacact

SEQ ID NO: 759 - RNA, 16 nt, synthetic construct
  source 1..16: mol_type = other RNA; note = PBS
catggaggttacactg

SEQ ID NO: 760 - RNA, 17 nt, synthetic construct
  source 1..17: mol_type = other RNA; note = PBS
catggaggttacactgg

SEQ ID NO: 761 - RNA, 18 nt, synthetic construct
  source 1..18: mol_type = other RNA; note = PBS
catggaggttacactggc

SEQ ID NO: 762 - RNA, 19 nt, synthetic construct
  source 1..19: mol_type = other RNA; note = PBS
catggaggttacactggca

SEQ ID NO: 763 - RNA, 17 nt, synthetic construct
  source 1..17: mol_type = other RNA; note = PEgRNA spacer (CAG PAM)
gtgtaacctccatggct

SEQ ID NO: 764 - RNA, 18 nt, synthetic construct
  source 1..18: mol_type = other RNA; note = PEgRNA spacer (CAG PAM)
agtgtaacctccatggct

SEQ ID NO: 765 - RNA, 19 nt, synthetic construct
  source 1..19: mol_type = other RNA; note = PEgRNA spacer (CAG PAM)
cagtgtaacctccatggct

SEQ ID NO: 766 - RNA, 21 nt, synthetic construct
  source 1..21: mol_type = other RNA; note = PEgRNA spacer (CAG PAM)
gccagtgtaacctccatggct

SEQ ID NO: 767 - RNA, 22 nt, synthetic construct
  source 1..22: mol_type = other RNA; note = PEgRNA spacer (CAG PAM)
tgccagtgtaacctccatggct

SEQ ID NO: 768 - RNA, 20 nt, synthetic construct
  source 1..20: mol_type = other RNA; note = RTT (CAG-to-GCG PAM silencing edit)
gcagaatttgttcacgctgc

SEQ ID NO: 769 - RNA, 20 nt, synthetic construct
  source 1..20: mol_type = other RNA; note = RTT*4
gcagaatttgttcactgagc

SEQ ID NO: 770 - RNA, 21 nt, synthetic construct
  source 1..21: mol_type = other RNA; note = RTT (CAG-to-GCG PAM silencing edit)
tgcagaatttgttcacgctgc

SEQ ID NO: 771 - RNA, 21 nt, synthetic construct
  source 1..21: mol_type = other RNA; note = RTT*4
tgcagaatttgttcactgagc

SEQ ID NO: 772 - RNA, 22 nt, synthetic construct
  source 1..22: mol_type = other RNA; note = RTT (CAG-to-GCG PAM silencing edit)
ttgcagaatttgttcacgctgc

SEQ ID NO: 773 - RNA, 22 nt, synthetic construct
  source 1..22: mol_type = other RNA; note = RTT*4
ttgcagaatttgttcactgagc

SEQ ID NO: 774 - RNA, 23 nt, synthetic construct
  source 1..23: mol_type = other RNA; note = RTT (CAG-to-GTG PAM silencing edit)
attgcagaatttgttcacactgc

SEQ ID NO: 775 - RNA, 23 nt, synthetic construct
  source 1..23: mol_type = other RNA; note = RTT*1 (CAG-to-CTG PAM silencing edit)
attgcagaatttgttcacagagc

SEQ ID NO: 776 - RNA, 23 nt, synthetic construct
  source 1..23: mol_type = other RNA; note = RTT*2 (CAG-to-CGG PAM silencing edit)
attgcagaatttgttcaccgagc

SEQ ID NO: 777 - RNA, 23 nt, synthetic construct
  source 1..23: mol_type = other RNA; note = RTT (CAG-to-GCG PAM silencing edit)
attgcagaatttgttcacgctgc

SEQ ID NO: 778 - RNA, 23 nt, synthetic construct
  source 1..23: mol_type = other RNA; note = RTT*3 (CAG-to-CCG PAM silencing edit)
attgcagaatttgttcacggagc

SEQ ID NO: 779 - RNA, 23 nt, synthetic construct
  source 1..23: mol_type = other RNA; note = RTT*4
attgcagaatttgttcactgagc

SEQ ID NO: 780 - RNA, 24 nt, synthetic construct
  source 1..24: mol_type = other RNA; note = RTT (CAG-to-GTG PAM silencing edit)
gattgcagaatttgttcacactgc

SEQ ID NO: 781 - RNA, 24 nt, synthetic construct
  source 1..24: mol_type = other RNA; note = RTT*1 (CAG-to-CTG PAM silencing edit)
gattgcagaatttgttcacagagc

SEQ ID NO: 782 - RNA, 24 nt, synthetic construct
  source 1..24: mol_type = other RNA; note = RTT*2 (CAG-to-CGG PAM silencing edit)
gattgcagaatttgttcaccgagc

SEQ ID NO: 783 - RNA, 24 nt, synthetic construct
  source 1..24: mol_type = other RNA; note = RTT (CAG-to-GCG PAM silencing edit)
gattgcagaatttgttcacgctgc

SEQ ID NO: 784 - RNA, 24 nt, synthetic construct
  source 1..24: mol_type = other RNA; note = RTT*3 (CAG-to-CCG PAM silencing edit)
gattgcagaatttgttcacggagc

SEQ ID NO: 785 - RNA, 24 nt, synthetic construct
  source 1..24: mol_type = other RNA; note = RTT*4
gattgcagaatttgttcactgagc

SEQ ID NO: 786 - RNA, 25 nt, synthetic construct
  source 1..25: mol_type = other RNA; note = RTT (CAG-to-GTG PAM silencing edit)
ggattgcagaatttgttcacactgc

SEQ ID NO: 787 - RNA, 25 nt, synthetic construct
  source 1..25: mol_type = other RNA; note = RTT*1 (CAG-to-CTG PAM silencing edit)
ggattgcagaatttgttcacagagc

SEQ ID NO: 788 - RNA, 25 nt, synthetic construct
  source 1..25: mol_type = other RNA; note = RTT*2 (CAG-to-CGG PAM silencing edit)
ggattgcagaatttgttcaccgagc

SEQ ID NO: 789 - RNA, 25 nt, synthetic construct
  source 1..25: mol_type = other RNA; note = RTT (CAG-to-GCG PAM silencing edit)
ggattgcagaatttgttcacgctgc

SEQ ID NO: 790 - RNA, 25 nt, synthetic construct
  source 1..25: mol_type = other RNA; note = RTT*3 (CAG-to-CCG PAM silencing edit)
ggattgcagaatttgttcacggagc

SEQ ID NO: 791 - RNA, 25 nt, synthetic construct
  source 1..25: mol_type = other RNA; note = RTT*4
ggattgcagaatttgttcactgagc

SEQ ID NO: 792 - RNA, 26 nt, synthetic construct
  source 1..26: mol_type = other RNA; note = RTT (CAG-to-GTG PAM silencing edit)
aggattgcagaatttgttcacactgc

SEQ ID NO: 793 - RNA, 26 nt, synthetic construct
  source 1..26: mol_type = other RNA; note = RTT*1 (CAG-to-CTG PAM silencing edit)
aggattgcagaatttgttcacagagc

SEQ ID NO: 794 - RNA, 26 nt, synthetic construct
  source 1..26: mol_type = other RNA; note = RTT*2 (CAG-to-CGG PAM silencing edit)
aggattgcagaatttgttcaccgagc

SEQ ID NO: 795 - RNA, 26 nt, synthetic construct
  source 1..26: mol_type = other RNA; note = RTT (CAG-to-GCG PAM silencing edit)
aggattgcagaatttgttcacgctgc

SEQ ID NO: 796 - RNA, 26 nt, synthetic construct
  source 1..26: mol_type = other RNA; note = RTT*3 (CAG-to-CCG PAM silencing edit)
aggattgcagaatttgttcacggagc

SEQ ID NO: 797 - RNA, 26 nt, synthetic construct
  source 1..26: mol_type = other RNA; note = RTT*4
aggattgcagaatttgttcactgagc

SEQ ID NO: 798 - RNA, 27 nt, synthetic construct
  source 1..27: mol_type = other RNA; note = RTT (CAG-to-GTG PAM silencing edit)
gaggattgcagaatttgttcacactgc

SEQ ID NO: 799 - RNA, 27 nt, synthetic construct
  source 1..27: mol_type = other RNA; note = RTT*1 (CAG-to-CTG PAM silencing edit)
gaggattgcagaatttgttcacagagc

SEQ ID NO: 800 - RNA, 27 nt, synthetic construct
  source 1..27: mol_type = other RNA; note = RTT*2 (CAG-to-CGG PAM silencing edit)
gaggattgcagaatttgttcaccgagc

SEQ ID NO: 801 - RNA, 27 nt, synthetic construct
  source 1..27: mol_type = other RNA; note = RTT (CAG-to-GCG PAM silencing edit)
gaggattgcagaatttgttcacgctgc

SEQ ID NO: 802 - RNA, 27 nt, synthetic construct
  source 1..27: mol_type = other RNA; note = RTT*3 (CAG-to-CCG PAM silencing edit)
gaggattgcagaatttgttcacggagc

SEQ ID NO: 803 - RNA, 27 nt, synthetic construct
  source 1..27: mol_type = other RNA; note = RTT*4
gaggattgcagaatttgttcactgagc

SEQ ID NO: 804 - RNA, 28 nt, synthetic construct
  source 1..28: mol_type = other RNA; note = RTT (CAG-to-GTG PAM silencing edit)
tgaggattgcagaatttgttcacactgc

SEQ ID NO: 805 - RNA, 28 nt, synthetic construct
  source 1..28: mol_type = other RNA; note = RTT*1 (CAG-to-CTG PAM silencing edit)
tgaggattgcagaatttgttcacagagc

SEQ ID NO: 806 - RNA, 28 nt, synthetic construct
  source 1..28: mol_type = other RNA; note = RTT*2 (CAG-to-CGG PAM silencing edit)
tgaggattgcagaatttgttcaccgagc

SEQ ID NO: 807 - RNA, 28 nt, synthetic construct
  source 1..28: mol_type = other RNA; note = RTT (CAG-to-GCG PAM silencing edit)
tgaggattgcagaatttgttcacgctgc

SEQ ID NO: 808 - RNA, 28 nt, synthetic construct
  source 1..28: mol_type = other RNA; note = RTT*3 (CAG-to-CCG PAM silencing edit)
tgaggattgcagaatttgttcacggagc

SEQ ID NO: 809 - RNA, 28 nt, synthetic construct
  source 1..28: mol_type = other RNA; note = RTT*4
tgaggattgcagaatttgttcactgagc

SEQ ID NO: 810 - RNA, 29 nt, synthetic construct
  source 1..29: mol_type = other RNA; note = RTT (CAG-to-GTG PAM silencing edit)
gtgaggattgcagaatttgttcacactgc

SEQ ID NO: 811 - RNA, 29 nt, synthetic construct
  source 1..29: mol_type = other RNA; note = RTT*1 (CAG-to-CTG PAM silencing edit)
gtgaggattgcagaatttgttcacagagc

SEQ ID NO: 812 - RNA, 29 nt, synthetic construct
  source 1..29: mol_type = other RNA; note = RTT*2 (CAG-to-CGG PAM silencing edit)
gtgaggattgcagaatttgttcaccgagc

SEQ ID NO: 813 - RNA, 29 nt, synthetic construct
  source 1..29: mol_type = other RNA; note = RTT (CAG-to-GCG PAM silencing edit)
gtgaggattgcagaatttgttcacgctgc

SEQ ID NO: 814 - RNA, 29 nt, synthetic construct
  source 1..29: mol_type = other RNA; note = RTT*3 (CAG-to-CCG PAM silencing edit)
gtgaggattgcagaatttgttcacggagc

SEQ ID NO: 815 - RNA, 29 nt, synthetic construct
  source 1..29: mol_type = other RNA; note = RTT*4
gtgaggattgcagaatttgttcactgagc

SEQ ID NO: 816 - RNA, 30 nt, synthetic construct
  source 1..30: mol_type = other RNA; note = RTT (CAG-to-GTG PAM silencing edit)
agtgaggattgcagaatttgttcacactgc

SEQ ID NO: 817 - RNA, 30 nt, synthetic construct
  source 1..30: mol_type = other RNA; note = RTT*1 (CAG-to-CTG PAM silencing edit)
agtgaggattgcagaatttgttcacagagc

SEQ ID NO: 818 - RNA, 30 nt, synthetic construct
  source 1..30: mol_type = other RNA; note = RTT*2 (CAG-to-CGG PAM silencing edit)
agtgaggattgcagaatttgttcaccgagc

SEQ ID NO: 819 - RNA, 30 nt, synthetic construct
  source 1..30: mol_type = other RNA; note = RTT (CAG-to-GCG PAM silencing edit)
agtgaggattgcagaatttgttcacgctgc

SEQ ID NO: 820 - RNA, 30 nt, synthetic construct
  source 1..30: mol_type = other RNA; note = RTT*3 (CAG-to-CCG PAM silencing edit)
agtgaggattgcagaatttgttcacggagc

SEQ ID NO: 821 - RNA, 30 nt, synthetic construct
  source 1..30: mol_type = other RNA; note = RTT*4
agtgaggattgcagaatttgttcactgagc

SEQ ID NO: 822 - RNA, 31 nt, synthetic construct
  source 1..31: mol_type = other RNA; note = RTT (CAG-to-GTG PAM silencing edit)
gagtgaggattgcagaatttgttcacactgc

SEQ ID NO: 823 - RNA, 31 nt, synthetic construct
  source 1..31: mol_type = other RNA; note = RTT*1 (CAG-to-CTG PAM silencing edit)
gagtgaggattgcagaatttgttcacagagc

SEQ ID NO: 824 - RNA, 31 nt, synthetic construct
  source 1..31: mol_type = other RNA; note = RTT*2 (CAG-to-CGG PAM silencing edit)
gagtgaggattgcagaatttgttcaccgagc

SEQ ID NO: 825 - RNA, 31 nt, synthetic construct
  source 1..31: mol_type = other RNA; note = RTT (CAG-to-GCG PAM silencing edit)
gagtgaggattgcagaatttgttcacgctgc

SEQ ID NO: 826 - RNA, 31 nt, synthetic construct
  source 1..31: mol_type = other RNA; note = RTT*3 (CAG-to-CCG PAM silencing edit)
gagtgaggattgcagaatttgttcacggagc

SEQ ID NO: 827 - RNA, 31 nt, synthetic construct
  source 1..31: mol_type = other RNA; note = RTT*4
gagtgaggattgcagaatttgttcactgagc

SEQ ID NO: 828 - RNA, 32 nt, synthetic construct
  source 1..32: mol_type = other RNA; note = RTT (CAG-to-GTG PAM silencing edit)
agagtgaggattgcagaatttgttcacactgc

SEQ ID NO: 829 - RNA, 32 nt, synthetic construct
  source 1..32: mol_type = other RNA; note = RTT*1 (CAG-to-CTG PAM silencing edit)
agagtgaggattgcagaatttgttcacagagc

SEQ ID NO: 830 - RNA, 32 nt, synthetic construct
  source 1..32: mol_type = other RNA; note = RTT*2 (CAG-to-CGG PAM silencing edit)
agagtgaggattgcagaatttgttcaccgagc

SEQ ID NO: 831 - RNA, 32 nt, synthetic construct
  source 1..32: mol_type = other RNA; note = RTT (CAG-to-GCG PAM silencing edit)
agagtgaggattgcagaatttgttcacgctgc

SEQ ID NO: 832 - RNA, 32 nt, synthetic construct
  source 1..32: mol_type = other RNA; note = RTT*3 (CAG-to-CCG PAM silencing edit)
agagtgaggattgcagaatttgttcacggagc

SEQ ID NO: 833 - RNA, 32 nt, synthetic construct
  source 1..32: mol_type = other RNA; note = RTT*4
agagtgaggattgcagaatttgttcactgagc

SEQ ID NO: 834 - RNA, 33 nt, synthetic construct
  source 1..33: mol_type = other RNA; note = RTT (CAG-to-GTG PAM silencing edit)
cagagtgaggattgcagaatttgttcacactgc

SEQ ID NO: 835 - RNA, 33 nt, synthetic construct
  source 1..33: mol_type = other RNA; note = RTT*1 (CAG-to-CTG PAM silencing edit)
cagagtgaggattgcagaatttgttcacagagc

SEQ ID NO: 836 - RNA, 33 nt, synthetic construct
  source 1..33: mol_type = other RNA; note = RTT*2 (CAG-to-CGG PAM silencing edit)
cagagtgaggattgcagaatttgttcaccgagc

SEQ ID NO: 837 - RNA, 33 nt, synthetic construct
  source 1..33: mol_type = other RNA; note = RTT (CAG-to-GCG PAM silencing edit)
cagagtgaggattgcagaatttgttcacgctgc

SEQ ID NO: 838 - RNA, 33 nt, synthetic construct
  source 1..33: mol_type = other RNA; note = RTT*3 (CAG-to-CCG PAM silencing edit)
cagagtgaggattgcagaatttgttcacggagc

SEQ ID NO: 839 - RNA, 33 nt, synthetic construct
  source 1..33: mol_type = other RNA; note = RTT*4
cagagtgaggattgcagaatttgttcactgagc

SEQ ID NO: 840 - RNA, 34 nt, synthetic construct
  source 1..34: mol_type = other RNA; note = RTT (CAG-to-GTG PAM silencing edit)
ccagagtgaggattgcagaatttgttcacactgc

SEQ ID NO: 841 - RNA, 34 nt, synthetic construct
  source 1..34: mol_type = other RNA; note = RTT*1 (CAG-to-CTG PAM silencing edit)
ccagagtgaggattgcagaatttgttcacagagc

SEQ ID NO: 842 - RNA, 34 nt, synthetic construct
  source 1..34: mol_type = other RNA; note = RTT*2 (CAG-to-CGG PAM silencing edit)
ccagagtgaggattgcagaatttgttcaccgagc

SEQ ID NO: 843 - RNA, 34 nt, synthetic construct
  source 1..34: mol_type = other RNA; note = RTT (CAG-to-GCG PAM silencing edit)
ccagagtgaggattgcagaatttgttcacgctgc

SEQ ID NO: 844 - RNA, 34 nt, synthetic construct
  source 1..34: mol_type = other RNA; note = RTT*3 (CAG-to-CCG PAM silencing edit)
ccagagtgaggattgcagaatttgttcacggagc

SEQ ID NO: 845 - RNA, 34 nt, synthetic construct
  source 1..34: mol_type = other RNA; note = RTT*4
ccagagtgaggattgcagaatttgttcactgagc

SEQ ID NO: 846 - RNA, 35 nt, synthetic construct
  source 1..35: mol_type = other RNA; note = RTT (CAG-to-GTG PAM silencing edit)
cccagagtgaggattgcagaatttgttcacactgc

SEQ ID NO: 847 - RNA, 35 nt, synthetic construct
  source 1..35: mol_type = other RNA; note = RTT*1 (CAG-to-CTG PAM silencing edit)
cccagagtgaggattgcagaatttgttcacagagc

SEQ ID NO: 848 - RNA, 35 nt, synthetic construct
  source 1..35: mol_type = other RNA; note = RTT*2 (CAG-to-CGG PAM silencing edit)
cccagagtgaggattgcagaatttgttcaccgagc

SEQ ID NO: 849 - RNA, 35 nt, synthetic construct
  source 1..35: mol_type = other RNA; note = RTT (CAG-to-GCG PAM silencing edit)
cccagagtgaggattgcagaatttgttcacgctgc

SEQ ID NO: 850 - RNA, 35 nt, synthetic construct
  source 1..35: mol_type = other RNA; note = RTT*3 (CAG-to-CCG PAM silencing edit)
cccagagtgaggattgcagaatttgttcacggagc

SEQ ID NO: 851 - RNA, 35 nt, synthetic construct
  source 1..35: mol_type = other RNA; note = RTT*4
cccagagtgaggattgcagaatttgttcactgagc

SEQ ID NO: 852 - RNA, 36 nt, synthetic construct
  source 1..36: mol_type = other RNA; note = RTT (CAG-to-GTG PAM silencing edit)
gcccagagtgaggattgcagaatttgttcacactgc

SEQ ID NO: 853 - RNA, 36 nt, synthetic construct
  source 1..36: mol_type = other RNA; note = RTT*1 (CAG-to-CTG PAM silencing edit)
gcccagagtgaggattgcagaatttgttcacagagc

SEQ ID NO: 854 - RNA, 36 nt, synthetic construct
  source 1..36: mol_type = other RNA; note = RTT*2 (CAG-to-CGG PAM silencing edit)
gcccagagtgaggattgcagaatttgttcaccgagc

SEQ ID NO: 855 - RNA, 36 nt, synthetic construct
  source 1..36: mol_type = other RNA; note = RTT (CAG-to-GCG PAM silencing edit)
gcccagagtgaggattgcagaatttgttcacgctgc

SEQ ID NO: 856 - RNA, 36 nt, synthetic construct
  source 1..36: mol_type = other RNA; note = RTT*3 (CAG-to-CCG PAM silencing edit)
gcccagagtgaggattgcagaatttgttcacggagc

SEQ ID NO: 857 - RNA, 36 nt, synthetic construct
  source 1..36: mol_type = other RNA; note = RTT*4
gcccagagtgaggattgcagaatttgttcactgagc

SEQ ID NO: 858 - RNA, 37 nt, synthetic construct
  source 1..37: mol_type = other RNA; note = RTT (CAG-to-GTG PAM silencing edit)
tgcccagagtgaggattgcagaatttgttcacactgc

SEQ ID NO: 859 - RNA, 37 nt, synthetic construct
  source 1..37: mol_type = other RNA; note = RTT*1 (CAG-to-CTG PAM silencing edit)
tgcccagagtgaggattgcagaatttgttcacagagc

SEQ ID NO: 860 - RNA, 37 nt, synthetic construct
  source 1..37: mol_type = other RNA; note = RTT*2 (CAG-to-CGG PAM silencing edit)
tgcccagagtgaggattgcagaatttgttcaccgagc

SEQ ID NO: 861 - RNA, 37 nt, synthetic construct
  source 1..37: mol_type = other RNA; note = RTT (CAG-to-GCG PAM silencing edit)
tgcccagagtgaggattgcagaatttgttcacgctgc

SEQ ID NO: 862 - RNA, 37 nt, synthetic construct
  source 1..37: mol_type = other RNA; note = RTT*3 (CAG-to-CCG PAM silencing edit)
tgcccagagtgaggattgcagaatttgttcacggagc

SEQ ID NO: 863 - RNA, 37 nt, synthetic construct
  source 1..37: mol_type = other RNA; note = RTT*4
tgcccagagtgaggattgcagaatttgttcactgagc

SEQ ID NO: 864 - RNA, 38 nt, synthetic construct
  source 1..38: mol_type = other RNA; note = RTT (CAG-to-GTG PAM silencing edit)
ctgcccagagtgaggattgcagaatttgttcacactgc

SEQ ID NO: 865 - RNA, 38 nt, synthetic construct
  source 1..38: mol_type = other RNA; note = RTT*1 (CAG-to-CTG PAM silencing edit)
ctgcccagagtgaggattgcagaatttgttcacagagc

SEQ ID NO: 866 - RNA, 38 nt, synthetic construct
  source 1..38: mol_type = other RNA; note = RTT*2 (CAG-to-CGG PAM silencing edit)
ctgcccagagtgaggattgcagaatttgttcaccgagc

SEQ ID NO: 867 - RNA, 38 nt, synthetic construct
  source 1..38: mol_type = other RNA; note = RTT (CAG-to-GCG PAM silencing edit)
ctgcccagagtgaggattgcagaatttgttcacgctgc

SEQ ID NO: 868 - RNA, 38 nt, synthetic construct
  source 1..38: mol_type = other RNA; note = RTT*3 (CAG-to-CCG PAM silencing edit)
ctgcccagagtgaggattgcagaatttgttcacggagc

SEQ ID NO: 869 - RNA, 38 nt, synthetic construct
  source 1..38: mol_type = other RNA; note = RTT*4
ctgcccagagtgaggattgcagaatttgttcactgagc

SEQ ID NO: 870 - RNA, 39 nt, synthetic construct
  source 1..39: mol_type = other RNA; note = RTT (CAG-to-GTG PAM silencing edit)
actgcccagagtgaggattgcagaatttgttcacactgc

SEQ ID NO: 871 - RNA, 39 nt, synthetic construct
  source 1..39: mol_type = other RNA; note = RTT*1 (CAG-to-CTG PAM silencing edit)
actgcccagagtgaggattgcagaatttgttcacagagc

SEQ ID NO: 872 - RNA, 39 nt, synthetic construct
  source 1..39: mol_type = other RNA; note = RTT*2 (CAG-to-CGG PAM silencing edit)
actgcccagagtgaggattgcagaatttgttcaccgagc

SEQ ID NO: 873 - RNA, 39 nt, synthetic construct
  source 1..39: mol_type = other RNA; note = RTT (CAG-to-GCG PAM silencing edit)
actgcccagagtgaggattgcagaatttgttcacgctgc

SEQ ID NO: 874 - RNA, 39 nt, synthetic construct
  source 1..39: mol_type = other RNA; note = RTT*3 (CAG-to-CCG PAM silencing edit)
actgcccagagtgaggattgcagaatttgttcacggagc

SEQ ID NO: 875 - RNA, 39 nt, synthetic construct
  source 1..39: mol_type = other RNA; note = RTT*4
actgcccagagtgaggattgcagaatttgttcactgagc

SEQ ID NO: 876 - RNA, 40 nt, synthetic construct
  source 1..40: mol_type = other RNA; note = RTT (CAG-to-GTG PAM silencing edit)
cactgcccagagtgaggattgcagaatttgttcacactgc

SEQ ID NO: 877 - RNA, 40 nt, synthetic construct
  source 1..40: mol_type = other RNA; note = RTT*1 (CAG-to-CTG PAM silencing edit)
cactgcccagagtgaggattgcagaatttgttcacagagc

SEQ ID NO: 878 - RNA, 40 nt, synthetic construct
  source 1..40: mol_type = other RNA; note = RTT*2 (CAG-to-CGG PAM silencing edit)
cactgcccagagtgaggattgcagaatttgttcaccgagc

SEQ ID NO: 879 - RNA, 40 nt, synthetic construct
  source 1..40: mol_type = other RNA; note = RTT (CAG-to-GCG PAM silencing edit)
cactgcccagagtgaggattgcagaatttgttcacgctgc

SEQ ID NO: 880 - RNA, 40 nt, synthetic construct
  source 1..40: mol_type = other RNA; note = RTT*3 (CAG-to-CCG PAM silencing edit)
cactgcccagagtgaggattgcagaatttgttcacggagc

SEQ ID NO: 881 - RNA, 40 nt, synthetic construct
  source 1..40: mol_type = other RNA; note = RTT*4
cactgcccagagtgaggattgcagaatttgttcactgagc

SEQ ID NO: 882 - RNA, 20 nt, synthetic construct
  source 1..20: mol_type = other RNA; note = PE3b*1 ngRNA spacer (GAG PAM)
gattgcagaatttgttcaca

SEQ ID NO: 883 - RNA, 20 nt, synthetic construct
  source 1..20: mol_type = other RNA; note = PE3b*2 ngRNA spacer (GAG PAM)
gattgcagaatttgttcacc

SEQ ID NO: 884 - RNA, 20 nt, synthetic construct
  source 1..20: mol_type = other RNA; note = PE3b*3 ngRNA spacer (GAG PAM)
gattgcagaatttgttcacg

SEQ ID NO: 885-889 - skipped (5 entries)

SEQ ID NO: 890 - RNA, 10 nt, synthetic construct
  source 1..10: mol_type = other RNA; note = PBS
tgagtgcaaa

SEQ ID NO: 891 - RNA, 12 nt, synthetic construct
  source 1..12: mol_type = other RNA; note = PBS
tgagtgcaaaaa

SEQ ID NO: 892 - RNA, 13 nt, synthetic construct
  source 1..13: mol_type = other RNA; note = PBS
tgagtgcaaaaaa

SEQ ID NO: 893 - RNA, 14 nt, synthetic construct
  source 1..14: mol_type = other RNA; note = PBS
tgagtgcaaaaaag

SEQ ID NO: 894 - RNA, 15 nt, synthetic construct
  source 1..15: mol_type = other RNA; note = PBS
tgagtgcaaaaaaga

SEQ ID NO: 895 - RNA, 16 nt, synthetic construct
  source 1..16: mol_type = other RNA; note = PBS
tgagtgcaaaaaagaa

SEQ ID NO: 896 - RNA, 17 nt, synthetic construct
  source 1..17: mol_type = other RNA; note = PBS
tgagtgcaaaaaagaag

SEQ ID NO: 897 - RNA, 18 nt, synthetic construct
  source 1..18: mol_type = other RNA; note = PBS
tgagtgcaaaaaagaagc

SEQ ID NO: 898 - RNA, 19 nt, synthetic construct
  source 1..19: mol_type = other RNA; note = PBS
tgagtgcaaaaaagaagcc

SEQ ID NO: 899 - RNA, 23 nt, synthetic construct
  source 1..23: mol_type = other RNA; note = RTT
tgcaatcctcactctgggcagtg

SEQ ID NO: 900 - RNA, 24 nt, synthetic construct
  source 1..24: mol_type = other RNA; note = RTT
ctgcaatcctcactctgggcagtg

SEQ ID NO: 901 - RNA, 25 nt, synthetic construct
  source 1..25: mol_type = other RNA; note = RTT
tctgcaatcctcactctgggcagtg

SEQ ID NO: 902 - RNA, 26 nt, synthetic construct
  source 1..26: mol_type = other RNA; note = RTT
ttctgcaatcctcactctgggcagtg

SEQ ID NO: 903 - RNA, 27 nt, synthetic construct
  source 1..27: mol_type = other RNA; note = RTT
attctgcaatcctcactctgggcagtg

SEQ ID NO: 904 - RNA, 28 nt, synthetic construct
  source 1..28: mol_type = other RNA; note = RTT
aattctgcaatcctcactctgggcagtg

SEQ ID NO: 905 - RNA, 29 nt, synthetic construct
  source 1..29: mol_type = other RNA; note = RTT
aaattctgcaatcctcactctgggcagtg

SEQ ID NO: 906 - RNA, 30 nt, synthetic construct
  source 1..30: mol_type = other RNA; note = RTT
caaattctgcaatcctcactctgggcagtg

SEQ ID NO: 907 - RNA, 31 nt, synthetic construct
  source 1..31: mol_type = other RNA; note = RTT
acaaattctgcaatcctcactctgggcagtg

SEQ ID NO: 908 - RNA, 32 nt, synthetic construct
  source 1..32: mol_type = other RNA; note = RTT
aacaaattctgcaatcctcactctgggcagtg

SEQ ID NO: 909 - RNA, 33 nt, synthetic construct
  source 1..33: mol_type = other RNA; note = RTT
gaacaaattctgcaatcctcactctgggcagtg

SEQ ID NO: 910 - RNA, 34 nt, synthetic construct
  source 1..34: mol_type = other RNA; note = RTT
tgaacaaattctgcaatcctcactctgggcagtg

SEQ ID NO: 911 - RNA, 35 nt, synthetic construct
  source 1..35: mol_type = other RNA; note = RTT
gtgaacaaattctgcaatcctcactctgggcagtg

SEQ ID NO: 912 - RNA, 36 nt, synthetic construct
  source 1..36: mol_type = other RNA; note = RTT
agtgaacaaattctgcaatcctcactctgggcagtg

SEQ ID NO: 913 - RNA, 37 nt, synthetic construct
  source 1..37: mol_type = other RNA; note = RTT
cagtgaacaaattctgcaatcctcactctgggcagtg

SEQ ID NO: 914 - RNA, 38 nt, synthetic construct
  source 1..38: mol_type = other RNA; note = RTT
tcagtgaacaaattctgcaatcctcactctgggcagtg

SEQ ID NO: 915 - RNA, 39 nt, synthetic construct
  source 1..39: mol_type = other RNA; note = RTT
ctcagtgaacaaattctgcaatcctcactctgggcagtg

SEQ ID NO: 916 - RNA, 40 nt, synthetic construct
  source 1..40: mol_type = other RNA; note = RTT
gctcagtgaacaaattctgcaatcctcactctgggcagtg

SEQ ID NO: 917-921 - skipped (5 entries)

SEQ ID NO: 922 - RNA, 10 nt, synthetic construct
  source 1..10: mol_type = other RNA; note = PBS
ctgggcagtg

SEQ ID NO: 923 - RNA, 11 nt, synthetic construct
  source 1..11: mol_type = other RNA; note = PBS
ctgggcagtgt

SEQ ID NO: 924 - RNA, 12 nt, synthetic construct
  source 1..12: mol_type = other RNA; note = PBS
ctgggcagtgtg

SEQ ID NO: 925 - RNA, 13 nt, synthetic construct
  source 1..13: mol_type = other RNA; note = PBS
ctgggcagtgtga

SEQ ID NO: 926 - RNA, 14 nt, synthetic construct
  source 1..14: mol_type = other RNA; note = PBS
ctgggcagtgtgag

SEQ ID NO: 927 - RNA, 15 nt, synthetic construct
  source 1..15: mol_type = other RNA; note = PBS
ctgggcagtgtgagt

SEQ ID NO: 928 - RNA, 16 nt, synthetic construct
  source 1..16: mol_type = other RNA; note = PBS
ctgggcagtgtgagtg

SEQ ID NO: 929 - RNA, 17 nt, synthetic construct
  source 1..17: mol_type = other RNA; note = PBS
ctgggcagtgtgagtgc

SEQ ID NO: 930 - RNA, 18 nt, synthetic construct
  source 1..18: mol_type = other RNA; note = PBS
ctgggcagtgtgagtgca

SEQ ID NO: 931 - RNA, 19 nt, synthetic construct
  source 1..19: mol_type = other RNA; note = PBS
ctgggcagtgtgagtgcaa

SEQ ID NO: 932 - RNA, 17 nt, synthetic construct
  source 1..17: mol_type = other RNA; note = RTT
ctcacactgcccagagt

SEQ ID NO: 933 - RNA, 18 nt, synthetic construct
  source 1..18: mol_type = other RNA; note = RTT
actcacactgcccagagt

SEQ ID NO: 934 - RNA, 19 nt, synthetic construct
  source 1..19: mol_type = other RNA; note = RTT
cactcacactgcccagagt

SEQ ID NO: 935 - RNA, 21 nt, synthetic construct
  source 1..21: mol_type = other RNA; note = RTT
tgcactcacactgcccagagt

SEQ ID NO: 936 - RNA, 22 nt, synthetic construct
  source 1..22: mol_type = other RNA; note = RTT
ttgcactcacactgcccagagt

SEQ ID NO: 937 - RNA, 13 nt, synthetic construct
  source 1..13: mol_type = other RNA; note = RTT (GAG-to-GGG PAM silencing edit)
tgcaatccccact

SEQ ID NO: 938 - RNA, 13 nt, synthetic construct
  source 1..13: mol_type = other RNA; note = RTT*1,2,3
tgcaatcctcact

SEQ ID NO: 939 - RNA, 14 nt, synthetic construct
  source 1..14: mol_type = other RNA; note = RTT (GAG-to-GGG PAM silencing edit)
ctgcaatccccact

SEQ ID NO: 940 - RNA, 14 nt, synthetic construct
  source 1..14: mol_type = other RNA; note = RTT*1,2,3
ctgcaatcctcact

SEQ ID NO: 941 - RNA, 15 nt, synthetic construct
  source 1..15: mol_type = other RNA; note = RTT (GAG-to-GGG PAM silencing edit)
tctgcaatccccact

SEQ ID NO: 942 - RNA, 15 nt, synthetic construct
  source 1..15: mol_type = other RNA; note = RTT*1,2,3
tctgcaatcctcact

SEQ ID NO: 943 - RNA, 16 nt, synthetic construct
  source 1..16: mol_type = other RNA; note = RTT (GAG-to-GTG PAM silencing edit)
ttctgcaatccacact

SEQ ID NO: 944 - RNA, 16 nt, synthetic construct
  source 1..16: mol_type = other RNA; note = RTT (GAG-to-GGG PAM silencing edit)
ttctgcaatccccact

SEQ ID NO: 945 - RNA, 16 nt, synthetic construct
  source 1..16: mol_type = other RNA; note = RTT (GAG-to-GCG PAM silencing edit)
ttctgcaatccgcact

SEQ ID NO: 946 - RNA, 16 nt, synthetic construct
  source 1..16: mol_type = other RNA; note = RTT*1,2,3
ttctgcaatcctcact

SEQ ID NO: 947 - RNA, 17 nt, synthetic construct
  source 1..17: mol_type = other RNA; note = RTT (GAG-to-GTG PAM silencing edit)
attctgcaatccacact

SEQ ID NO: 948 - RNA, 17 nt, synthetic construct
  source 1..17: mol_type = other RNA; note = RTT (GAG-to-GGG PAM silencing edit)
attctgcaatccccact

SEQ ID NO: 949 - RNA, 17 nt, synthetic construct
  source 1..17: mol_type = other RNA; note = RTT (GAG-to-GCG PAM silencing edit)
attctgcaatccgcact

SEQ ID NO: 950 - RNA, 17 nt, synthetic construct
  source 1..17: mol_type = other RNA; note = PEgRNA spacer (CTGG PAM)
attctgcaatcctcact

SEQ ID NO: 951 - RNA, 18 nt, synthetic construct
  source 1..18: mol_type = other RNA; note = RTT (GAG-to-GTG PAM silencing edit)
aattctgcaatccacact

SEQ ID NO: 952 - RNA, 18 nt, synthetic construct
  source 1..18: mol_type = other RNA; note = RTT (GAG-to-GGG PAM silencing edit)
aattctgcaatccccact

SEQ ID NO: 953 - RNA, 18 nt, synthetic construct
  source 1..18: mol_type = other RNA; note = RTT (GAG-to-GCG PAM silencing edit)
aattctgcaatccgcact

SEQ ID NO: 954 - RNA, 18 nt, synthetic construct
  source 1..18: mol_type = other RNA; note = PEgRNA spacer (CTGG PAM)
aattctgcaatcctcact

SEQ ID NO: 955 - RNA, 19 nt, synthetic construct
  source 1..19: mol_type = other RNA; note = RTT (GAG-to-GTG PAM silencing edit)
aaattctgcaatccacact

SEQ ID NO: 956 - RNA, 19 nt, synthetic construct
  source 1..19: mol_type = other RNA; note = RTT (GAG-to-GGG PAM silencing edit)
aaattctgcaatccccact

SEQ ID NO: 957 - RNA, 19 nt, synthetic construct
  source 1..19: mol_type = other RNA; note = RTT (GAG-to-GCG PAM silencing edit)
aaattctgcaatccgcact

SEQ ID NO: 958 - RNA, 19 nt, synthetic construct
  source 1..19: mol_type = other RNA; note = PEgRNA spacer (CTGG PAM)
aaattctgcaatcctcact

SEQ ID NO: 959 - RNA, 20 nt, synthetic construct
  source 1..20: mol_type = other RNA; note = RTT (GAG-to-GTG PAM silencing edit)
caaattctgcaatccacact

SEQ ID NO: 960 - RNA, 20 nt, synthetic construct
  source 1..20: mol_type = other RNA; note = RTT (GAG-to-GGG PAM silencing edit)
caaattctgcaatccccact

SEQ ID NO: 961 - RNA, 20 nt, synthetic construct
  source 1..20: mol_type = other RNA; note = RTT (GAG-to-GCG PAM silencing edit)
caaattctgcaatccgcact

SEQ ID NO: 962 - RNA, 20 nt, synthetic construct
  source 1..20: mol_type = other RNA; note = PE3 ngRNA spacer (CTGG PAM)
caaattctgcaatcctcact

SEQ ID NO: 963 - RNA, 21 nt, synthetic construct
  source 1..21: mol_type = other RNA; note = RTT (GAG-to-GTG PAM silencing edit)
acaaattctgcaatccacact

SEQ ID NO: 964 - RNA, 21 nt, synthetic construct
  source 1..21: mol_type = other RNA; note = RTT (GAG-to-GGG PAM silencing edit)
acaaattctgcaatccccact

SEQ ID NO: 965 - RNA, 21 nt, synthetic construct
  source 1..21: mol_type = other RNA; note = RTT (GAG-to-GCG PAM silencing edit)
acaaattctgcaatccgcact

SEQ ID NO: 966 - RNA, 21 nt, synthetic construct
  source 1..21: mol_type = other RNA; note = PEgRNA spacer (CTGG PAM)
acaaattctgcaatcctcact

SEQ ID NO: 967 - RNA, 22 nt, synthetic construct
  source 1..22: mol_type = other RNA; note = RTT (GAG-to-GTG PAM silencing edit)
aacaaattctgcaatccacact

SEQ ID NO: 968 - RNA, 22 nt, synthetic construct
  source 1..22: mol_type = other RNA; note = RTT (GAG-to-GGG PAM silencing edit)
aacaaattctgcaatccccact

SEQ ID NO: 969 - RNA, 22 nt, synthetic construct
  source 1..22: mol_type = other RNA; note = RTT (GAG-to-GCG PAM silencing edit)
aacaaattctgcaatccgcact

SEQ ID NO: 970 - RNA, 22 nt, synthetic construct
  source 1..22: mol_type = other RNA; note = PEgRNA spacer (CTGG PAM)
aacaaattctgcaatcctcact

SEQ ID NO: 971 - RNA, 23 nt, synthetic construct
  source 1..23: mol_type = other RNA; note = RTT (GAG-to-GTG PAM silencing edit)
gaacaaattctgcaatccacact

SEQ ID NO: 972 - RNA, 23 nt, synthetic construct
  source 1..23: mol_type = other RNA; note = RTT (GAG-to-GGG PAM silencing edit)
gaacaaattctgcaatccccact

SEQ ID NO: 973 - RNA, 23 nt, synthetic construct
  source 1..23: mol_type = other RNA; note = RTT (GAG-to-GCG PAM silencing edit)
gaacaaattctgcaatccgcact

SEQ ID NO: 974 - RNA, 23 nt, synthetic construct
  source 1..23: mol_type = other RNA; note = RTT*1,2,3
gaacaaattctgcaatcctcact

SEQ ID NO: 975 - RNA, 24 nt, synthetic construct
  source 1..24: mol_type = other RNA; note = RTT (GAG-to-GTG PAM silencing edit)
tgaacaaattctgcaatccacact

SEQ ID NO: 976 - RNA, 24 nt, synthetic construct
  source 1..24: mol_type = other RNA; note = RTT (GAG-to-GGG PAM silencing edit)
tgaacaaattctgcaatccccact

SEQ ID NO: 977 - RNA, 24 nt, synthetic construct
  source 1..24: mol_type = other RNA; note = RTT (GAG-to-GCG PAM silencing edit)
tgaacaaattctgcaatccgcact

SEQ ID NO: 978 - RNA, 24 nt, synthetic construct
  source 1..24: mol_type = other RNA; note = RTT*1,2,3
tgaacaaattctgcaatcctcact

SEQ ID NO: 979 - RNA, 25 nt, synthetic construct
  source 1..25: mol_type = other RNA; note = RTT (GAG-to-GTG PAM silencing edit)
gtgaacaaattctgcaatccacact

SEQ ID NO: 980 - RNA, 25 nt, synthetic construct
  source 1..25: mol_type = other RNA; note = RTT (GAG-to-GGG PAM silencing edit)
gtgaacaaattctgcaatccccact

SEQ ID NO: 981 - RNA, 25 nt, synthetic construct
  source 1..25: mol_type = other RNA; note = RTT (GAG-to-GCG PAM silencing edit)
gtgaacaaattctgcaatccgcact

SEQ ID NO: 982 - RNA, 25 nt, synthetic construct
  source 1..25: mol_type = other RNA; note = RTT*1,2,3
gtgaacaaattctgcaatcctcact

SEQ ID NO: 983 - RNA, 26 nt, synthetic construct
  source 1..26: mol_type = other RNA; note = RTT (GAG-to-GTG PAM silencing edit)
agtgaacaaattctgcaatccacact

SEQ ID NO: 984 - RNA, 26 nt, synthetic construct
  source 1..26: mol_type = other RNA; note = RTT (GAG-to-GGG PAM silencing edit)
agtgaacaaattctgcaatccccact

SEQ ID NO: 985 - RNA, 26 nt, synthetic construct
  source 1..26: mol_type = other RNA; note = RTT (GAG-to-GCG PAM silencing edit)
agtgaacaaattctgcaatccgcact

SEQ ID NO: 986 - RNA, 26 nt, synthetic construct
  source 1..26: mol_type = other RNA; note = RTT*1,2,3
agtgaacaaattctgcaatcctcact

SEQ ID NO: 987 - RNA, 27 nt, synthetic construct
  source 1..27: mol_type = other RNA; note = RTT (GAG-to-GTG PAM silencing edit)
cagtgaacaaattctgcaatccacact

SEQ ID NO: 988 - RNA, 27 nt, synthetic construct
  source 1..27: mol_type = other RNA; note = RTT (GAG-to-GGG PAM silencing edit)
cagtgaacaaattctgcaatccccact

SEQ ID NO: 989 - RNA, 27 nt, synthetic construct
  source 1..27: mol_type = other RNA; note = RTT (GAG-to-GCG PAM silencing edit)
cagtgaacaaattctgcaatccgcact

SEQ ID NO: 990 - RNA, 27 nt, synthetic construct
  source 1..27: mol_type = other RNA; note = RTT*1,2,3
cagtgaacaaattctgcaatcctcact

SEQ ID NO: 991 - RNA, 28 nt, synthetic construct
  source 1..28: mol_type = other RNA; note = RTT (GAG-to-GTG PAM silencing edit)
tcagtgaacaaattctgcaatccacact

SEQ ID NO: 992 - RNA, 28 nt, synthetic construct
  source 1..28: mol_type = other RNA; note = RTT (GAG-to-GGG PAM silencing edit)
tcagtgaacaaattctgcaatccccact

SEQ ID NO: 993 - RNA, 28 nt, synthetic construct
  source 1..28: mol_type = other RNA; note = RTT (GAG-to-GCG PAM silencing edit)
tcagtgaacaaattctgcaatccgcact

SEQ ID NO: 994 - RNA, 28 nt, synthetic construct
  source 1..28: mol_type = other RNA; note = RTT*1,2,3
tcagtgaacaaattctgcaatcctcact

SEQ ID NO: 995 - RNA, 29 nt, synthetic construct
  source 1..29: mol_type = other RNA; note = RTT (GAG-to-GTG PAM silencing edit)
ctcagtgaacaaattctgcaatccacact

SEQ ID NO: 996 - RNA, 29 nt, synthetic construct
  source 1..29: mol_type = other RNA; note = RTT (GAG-to-GGG PAM silencing edit)
ctcagtgaacaaattctgcaatccccact

SEQ ID NO: 997 - RNA, 29 nt, synthetic construct
  source 1..29: mol_type = other RNA; note = RTT (GAG-to-GCG PAM silencing edit)
ctcagtgaacaaattctgcaatccgcact

SEQ ID NO: 998 - RNA, 29 nt, synthetic construct
  source 1..29: mol_type = other RNA; note = RTT*1,2,3
ctcagtgaacaaattctgcaatcctcact

SEQ ID NO: 999 - RNA, 30 nt, synthetic construct
  source 1..30: mol_type = other RNA; note = RTT (GAG-to-GTG PAM silencing edit)
gctcagtgaacaaattctgcaatccacact

SEQ ID NO: 1000 - RNA, 30 nt, synthetic construct
  source 1..30: mol_type = other RNA; note = RTT (GAG-to-GGG PAM silencing edit)
gctcagtgaacaaattctgcaatccccact

SEQ ID NO: 1001 - RNA, 30 nt, synthetic construct
  source 1..30: mol_type = other RNA; note = RTT (GAG-to-GCG PAM silencing edit)
gctcagtgaacaaattctgcaatccgcact

SEQ ID NO: 1002 - RNA, 30 nt, synthetic construct
  source 1..30: mol_type = other RNA; note = RTT*1,2,3
gctcagtgaacaaattctgcaatcctcact

SEQ ID NO: 1003 - RNA, 31 nt, synthetic construct
  source 1..31: mol_type = other RNA; note = RTT (GAG-to-GTG PAM silencing edit)
ggctcagtgaacaaattctgcaatccacact

SEQ ID NO: 1004 - RNA, 31 nt, synthetic construct
  source 1..31: mol_type = other RNA; note = RTT (GAG-to-GGG PAM silencing edit)
ggctcagtgaacaaattctgcaatccccact

SEQ ID NO: 1005 - RNA, 31 nt, synthetic construct
  source 1..31: mol_type = other RNA; note = RTT (GAG-to-GCG PAM silencing edit)
ggctcagtgaacaaattctgcaatccgcact

SEQ ID NO: 1006 - RNA, 31 nt, synthetic construct
  source 1..31: mol_type = other RNA; note = RTT*1,2,3
ggctcagtgaacaaattctgcaatcctcact

SEQ ID NO: 1007 - RNA, 32 nt, synthetic construct
  source 1..32: mol_type = other RNA; note = RTT (GAG-to-GTG PAM silencing edit)
tggctcagtgaacaaattctgcaatccacact

SEQ ID NO: 1008 - RNA, 32 nt, synthetic construct
  source 1..32: mol_type = other RNA; note = RTT (GAG-to-GGG PAM silencing edit)
tggctcagtgaacaaattctgcaatccccact

SEQ ID NO: 1009 - RNA, 32 nt, synthetic construct
  source 1..32: mol_type = other RNA; note = RTT (GAG-to-GCG PAM silencing edit)
tggctcagtgaacaaattctgcaatccgcact

SEQ ID NO: 1010 - RNA, 32 nt, synthetic construct
  source 1..32: mol_type = other RNA; note = RTT*1,2,3
tggctcagtgaacaaattctgcaatcctcact

SEQ ID NO: 1011 - RNA, 33 nt, synthetic construct
  source 1..33: mol_type = other RNA; note = RTT (GAG-to-GTG PAM silencing edit)
atggctcagtgaacaaattctgcaatccacact

SEQ ID NO: 1012 - RNA, 33 nt, synthetic construct
  source 1..33: mol_type = other RNA; note = RTT (GAG-to-GGG PAM silencing edit)
atggctcagtgaacaaattctgcaatccccact

SEQ ID NO: 1013 - RNA, 33 nt, synthetic construct
  source 1..33: mol_type = other RNA; note = RTT (GAG-to-GCG PAM silencing edit)
atggctcagtgaacaaattctgcaatccgcact

SEQ ID NO: 1014 - RNA, 33 nt, synthetic construct
  source 1..33: mol_type = other RNA; note = RTT*1,2,3
atggctcagtgaacaaattctgcaatcctcact

SEQ ID NO: 1015 - RNA, 34 nt, synthetic construct
  source 1..34: mol_type = other RNA; note = RTT (GAG-to-GTG PAM silencing edit)
catggctcagtgaacaaattctgcaatccacact

SEQ ID NO: 1016 - RNA, 34 nt, synthetic construct
  source 1..34: mol_type = other RNA; note = RTT (GAG-to-GGG PAM silencing edit)
catggctcagtgaacaaattctgcaatccccact

SEQ ID NO: 1017 - RNA, 34 nt, synthetic construct
  source 1..34: mol_type = other RNA; note = RTT (GAG-to-GCG PAM silencing edit)
catggctcagtgaacaaattctgcaatccgcact

SEQ ID NO: 1018 - RNA, 34 nt, synthetic construct
  source 1..34: mol_type = other RNA; note = RTT*1,2,3
catggctcagtgaacaaattctgcaatcctcact

SEQ ID NO: 1019 - RNA, 35 nt, synthetic construct
  source 1..35: mol_type = other RNA; note = RTT (GAG-to-GTG PAM silencing edit)
ccatggctcagtgaacaaattctgcaatccacact

SEQ ID NO: 1020 - RNA, 35 nt, synthetic construct
  source 1..35: mol_type = other RNA; note = RTT (GAG-to-GGG PAM silencing edit)
ccatggctcagtgaacaaattctgcaatccccact

SEQ ID NO: 1021 - RNA, 35 nt, synthetic construct
  source 1..35: mol_type = other RNA; note = RTT (GAG-to-GCG PAM silencing edit)
ccatggctcagtgaacaaattctgcaatccgcact

SEQ ID NO: 1022 - RNA, 35 nt, synthetic construct
  source 1..35: mol_type = other RNA; note = RTT*1,2,3
ccatggctcagtgaacaaattctgcaatcctcact

SEQ ID NO: 1023 - RNA, 36 nt, synthetic construct
  source 1..36: mol_type = other RNA; note = RTT (GAG-to-GTG PAM silencing edit)
tccatggctcagtgaacaaattctgcaatccacact

SEQ ID NO: 1024 - RNA, 36 nt, synthetic construct
  source 1..36: mol_type = other RNA; note = RTT (GAG-to-GGG PAM silencing edit)
tccatggctcagtgaacaaattctgcaatccccact

SEQ ID NO: 1025 - RNA, 36 nt, synthetic construct
  source 1..36: mol_type = other RNA; note = RTT (GAG-to-GCG PAM silencing edit)
tccatggctcagtgaacaaattctgcaatccgcact

SEQ ID NO: 1026 - RNA, 36 nt, synthetic construct
  source 1..36: mol_type = other RNA; note = RTT*1,2,3
tccatggctcagtgaacaaattctgcaatcctcact

SEQ ID NO: 1027 - RNA, 37 nt, synthetic construct
  source 1..37: mol_type = other RNA; note = RTT (GAG-to-GTG PAM silencing edit)
ctccatggctcagtgaacaaattctgcaatccacact

SEQ ID NO: 1028 - RNA, 37 nt, synthetic construct
  source 1..37: mol_type = other RNA; note = RTT (GAG-to-GGG PAM silencing edit)
ctccatggctcagtgaacaaattctgcaatccccact

SEQ ID NO: 1029 - RNA, 37 nt, synthetic construct
  source 1..37: mol_type = other RNA; note = RTT (GAG-to-GCG PAM silencing edit)
ctccatggctcagtgaacaaattctgcaatccgcact

SEQ ID NO: 1030 - RNA, 37 nt, synthetic construct
  source 1..37: mol_type = other RNA; note = RTT*1,2,3
ctccatggctcagtgaacaaattctgcaatcctcact

SEQ ID NO: 1031 - RNA, 38 nt, synthetic construct
  source 1..38: mol_type = other RNA; note = RTT (GAG-to-GTG PAM silencing edit)
cctccatggctcagtgaacaaattctgcaatccacact

SEQ ID NO: 1032 - RNA, 38 nt, synthetic construct
  source 1..38: mol_type = other RNA; note = RTT (GAG-to-GGG PAM silencing edit)
cctccatggctcagtgaacaaattctgcaatccccact

SEQ ID NO: 1033 - RNA, 38 nt, synthetic construct
  source 1..38: mol_type = other RNA; note = RTT (GAG-to-GCG PAM silencing edit)
cctccatggctcagtgaacaaattctgcaatccgcact

SEQ ID NO: 1034 - RNA, 38 nt, synthetic construct
  source 1..38: mol_type = other RNA; note = RTT*1,2,3
cctccatggctcagtgaacaaattctgcaatcctcact

SEQ ID NO: 1035 - RNA, 39 nt, synthetic construct
  source 1..39: mol_type = other RNA; note = RTT (GAG-to-GTG PAM silencing edit)
acctccatggctcagtgaacaaattctgcaatccacact

SEQ ID NO: 1036 - RNA, 39 nt, synthetic construct
  source 1..39: mol_type = other RNA; note = RTT (GAG-to-GGG PAM silencing edit)
acctccatggctcagtgaacaaattctgcaatccccact

SEQ ID NO: 1037 - RNA, 39 nt, synthetic construct
  source 1..39: mol_type = other RNA; note = RTT (GAG-to-GCG PAM silencing edit)
acctccatggctcagtgaacaaattctgcaatccgcact

SEQ ID NO: 1038 - RNA, 39 nt, synthetic construct
  source 1..39: mol_type = other RNA; note = RTT*1,2,3
acctccatggctcagtgaacaaattctgcaatcctcact

SEQ ID NO: 1039 - RNA, 40 nt, synthetic construct
  source 1..40: mol_type = other RNA; note = RTT (GAG-to-GTG PAM silencing edit)
aacctccatggctcagtgaacaaattctgcaatccacact

SEQ ID NO: 1040 - RNA, 40 nt, synthetic construct
  source 1..40: mol_type = other RNA; note = RTT (GAG-to-GGG PAM silencing edit)
aacctccatggctcagtgaacaaattctgcaatccccact

SEQ ID NO: 1041 - RNA, 40 nt, synthetic construct
  source 1..40: mol_type = other RNA; note = RTT (GAG-to-GCG PAM silencing edit)
aacctccatggctcagtgaacaaattctgcaatccgcact

SEQ ID NO: 1042 - RNA, 40 nt, synthetic construct
  source 1..40: mol_type = other RNA; note = RTT*1,2,3
aacctccatggctcagtgaacaaattctgcaatcctcact

SEQ ID NO: 1043 - RNA, 20 nt, synthetic construct
  source 1..20: mol_type = other RNA; note = PE3 ngRNA spacer (ATGG PAM)
gccctgccagtgtaacctcc

SEQ ID NO: 1044-1048 - skipped (5 entries)

SEQ ID NO: 1049 - RNA, 10 nt, synthetic construct
  source 1..10: mol_type = other RNA; note = PBS
ggttacactg

SEQ ID NO: 1050 - RNA, 11 nt, synthetic construct
  source 1..11: mol_type = other RNA; note = PBS
ggttacactgg

SEQ ID NO: 1051 - RNA, 12 nt, synthetic construct
  source 1..12: mol_type = other RNA; note = PBS
ggttacactggc

SEQ ID NO: 1052 - RNA, 13 nt, synthetic construct
  source 1..13: mol_type = other RNA; note = PBS
ggttacactggca

SEQ ID NO: 1053 - RNA, 14 nt, synthetic construct
  source 1..14: mol_type = other RNA; note = PBS
ggttacactggcag

SEQ ID NO: 1054 - RNA, 15 nt, synthetic construct
  source 1..15: mol_type = other RNA; note = PBS
ggttacactggcagg

SEQ ID NO: 1055 - RNA, 16 nt, synthetic construct
  source 1..16: mol_type = other RNA; note = PBS
ggttacactggcaggg

SEQ ID NO: 1056 - RNA, 17 nt, synthetic construct
  source 1..17: mol_type = other RNA; note = PBS
ggttacactggcagggc

SEQ ID NO: 1057 - RNA, 18 nt, synthetic construct
  source 1..18: mol_type = other RNA; note = PBS
ggttacactggcagggct

SEQ ID NO: 1058 - RNA, 19 nt, synthetic construct
  source 1..19: mol_type = other RNA; note = PBS
ggttacactggcagggctc

SEQ ID NO: 1059 - RNA, 17 nt, synthetic construct
  source 1..17: mol_type = other RNA; note = PEgRNA spacer (ATGG PAM)
ctgccagtgtaacctcc

SEQ ID NO: 1060 - RNA, 18 nt, synthetic construct
  source 1..18: mol_type = other RNA; note = PEgRNA spacer (ATGG PAM)
cctgccagtgtaacctcc

SEQ ID NO: 1061 - RNA, 19 nt, synthetic construct
  source 1..19: mol_type = other RNA; note = PEgRNA spacer (ATGG PAM)
ccctgccagtgtaacctcc

SEQ ID NO: 1062 - RNA, 21 nt, synthetic construct
  source 1..21: mol_type = other RNA; note = PEgRNA spacer (ATGG PAM)
agccctgccagtgtaacctcc

SEQ ID NO: 1063 - RNA, 22 nt, synthetic construct
  source 1..22: mol_type = other RNA; note = PEgRNA spacer (ATGG PAM)
gagccctgccagtgtaacctcc

SEQ ID NO: 1064 - RNA, 26 nt, synthetic construct
  source 1..26: mol_type = other RNA; note = RTT
gcagaatttgttcactgagccatgga

SEQ ID NO: 1065 - RNA, 27 nt, synthetic construct
  source 1..27: mol_type = other RNA; note = RTT
tgcagaatttgttcactgagccatgga

SEQ ID NO: 1066 - RNA, 28 nt, synthetic construct
  source 1..28: mol_type = other RNA; note = RTT
ttgcagaatttgttcactgagccatgga

SEQ ID NO: 1067 - RNA, 29 nt, synthetic construct
  source 1..29: mol_type = other RNA; note = RTT
attgcagaatttgttcactgagccatgga

SEQ ID NO: 1068 - RNA, 30 nt, synthetic construct
  source 1..30: mol_type = other RNA; note = RTT
gattgcagaatttgttcactgagccatgga

SEQ ID NO: 1069 - RNA, 31 nt, synthetic construct
  source 1..31: mol_type = other RNA; note = RTT
ggattgcagaatttgttcactgagccatgga

SEQ ID NO: 1070 - RNA, 32 nt, synthetic construct
  source 1..32: mol_type = other RNA; note = RTT
aggattgcagaatttgttcactgagccatgga

SEQ ID NO: 1071 - RNA, 33 nt, synthetic construct
  source 1..33: mol_type = other RNA; note = RTT
gaggattgcagaatttgttcactgagccatgga

SEQ ID NO: 1072 - RNA, 34 nt, synthetic construct
  source 1..34: mol_type = other RNA; note = RTT
tgaggattgcagaatttgttcactgagccatgga

SEQ ID NO: 1073 - RNA, 35 nt, synthetic construct
  source 1..35: mol_type = other RNA; note = RTT
gtgaggattgcagaatttgttcactgagccatgga

SEQ ID NO: 1074 - RNA, 36 nt, synthetic construct
  source 1..36: mol_type = other RNA; note = RTT
agtgaggattgcagaatttgttcactgagccatgga

SEQ ID NO: 1075 - RNA, 37 nt, synthetic construct
  source 1..37: mol_type = other RNA; note = RTT
gagtgaggattgcagaatttgttcactgagccatgga

SEQ ID NO: 1076 - RNA, 38 nt, synthetic construct
  source 1..38: mol_type = other RNA; note = RTT
agagtgaggattgcagaatttgttcactgagccatgga

SEQ ID NO: 1077 - RNA, 39 nt, synthetic construct
  source 1..39: mol_type = other RNA; note = RTT
cagagtgaggattgcagaatttgttcactgagccatgga

SEQ ID NO: 1078 - RNA, 40 nt, synthetic construct
  source 1..40: mol_type = other RNA; note = RTT
ccagagtgaggattgcagaatttgttcactgagccatgga

SEQ ID NO: 1079 - RNA, 20 nt, synthetic construct
  source 1..20: mol_type = other RNA; note = PEgRNA spacer (TTGG PAM)
aggtgtcacactgaagtcct

SEQ ID NO: 1080 - RNA, 20 nt, synthetic construct
  source 1..20: mol_type = other RNA; note = PE3b ngRNA spacer (ATGG PAM)
cagaatttgttcactgagcc

SEQ ID NO: 1081-1085 - skipped (5 entries)

SEQ ID NO: 1086 - RNA, 10 nt, synthetic construct
  source 1..10: mol_type = other RNA; note = PBS
ggcagtgtga

SEQ ID NO: 1087 - RNA, 11 nt, synthetic construct
  source 1..11: mol_type = other RNA; note = PBS
ggcagtgtgag

SEQ ID NO: 1088 - RNA, 12 nt, synthetic construct
  source 1..12: mol_type = other RNA; note = PBS
ggcagtgtgagt

SEQ ID NO: 1089 - RNA, 13 nt, synthetic construct
  source 1..13: mol_type = other RNA; note = PBS
ggcagtgtgagtg

SEQ ID NO: 1090 - RNA, 14 nt, synthetic construct
  source 1..14: mol_type = other RNA; note = PBS
ggcagtgtgagtgc

SEQ ID NO: 1091 - RNA, 15 nt, synthetic construct
  source 1..15: mol_type = other RNA; note = PBS
ggcagtgtgagtgca

SEQ ID NO: 1092 - RNA, 16 nt, synthetic construct
  source 1..16: mol_type = other RNA; note = PBS
ggcagtgtgagtgcaa

SEQ ID NO: 1093 - RNA, 17 nt, synthetic construct
  source 1..17: mol_type = other RNA; note = PBS
ggcagtgtgagtgcaaa

SEQ ID NO: 1094 - RNA, 19 nt, synthetic construct
  source 1..19: mol_type = other RNA; note = PBS
ggcagtgtgagtgcaaaaa

SEQ ID NO: 1095 - RNA, 17 nt, synthetic construct
  source 1..17: mol_type = other RNA; note = RTT*1,2,4,8,12,15
gcactcacactgcccag

SEQ ID NO: 1096 - RNA, 18 nt, synthetic construct
  source 1..18: mol_type = other RNA; note = RTT*1,2,4,8,12,15
tgcactcacactgcccag

SEQ ID NO: 1097 - RNA, 19 nt, synthetic construct
  source 1..19: mol_type = other RNA; note = RTT*1,2,4,8,12,15
ttgcactcacactgcccag

SEQ ID NO: 1098 - RNA, 20 nt, synthetic construct
  source 1..20: mol_type = other RNA; note = PE3b*7 ngRNA spacer (AG PAM)
tttgcactcacactgcccag

SEQ ID NO: 1099 - RNA, 21 nt, synthetic construct
  source 1..21: mol_type = other RNA; note = RTT*1,2,4,8,12,15
ttttgcactcacactgcccag

SEQ ID NO: 1100 - RNA, 22 nt, synthetic construct
  source 1..22: mol_type = other RNA; note = RTT*1,2,4,8,12,15
tttttgcactcacactgcccag

SEQ ID NO: 1101 - RNA, 16 nt, synthetic construct
  source 1..16: mol_type = other RNA; note = RTT*1,3,5,7
tgcaatcctcactctg

SEQ ID NO: 1102 - RNA, 17 nt, synthetic construct
  source 1..17: mol_type = other RNA; note = PEgRNA spacer (GG;GGCAGT PAM)
ctgcaatcctcactctg

SEQ ID NO: 1103 - RNA, 18 nt, synthetic construct
  source 1..18: mol_type = other RNA; note = PEgRNA spacer (GG;GGCAGT PAM)
tctgcaatcctcactctg

SEQ ID NO: 1104 - RNA, 19 nt, synthetic construct
  source 1..19: mol_type = other RNA; note = PEgRNA spacer (GG;GGCAGT PAM)
ttctgcaatcctcactctg

SEQ ID NO: 1105 - RNA, 19 nt, synthetic construct
  source 1..19: mol_type = other RNA; note = RTT*2,4,6,8 (AG-to-AA PAM silencing edit)
ttctgcaatcctcattctg

SEQ ID NO: 1106 - RNA, 20 nt, synthetic construct
  source 1..20: mol_type = other RNA; note = RTT*2,4,6,8 (AG-to-AA PAM silencing edit)
attctgcaatcctcattctg

SEQ ID NO: 1107 - RNA, 21 nt, synthetic construct
  source 1..21: mol_type = other RNA; note = PEgRNA spacer (GG;GGCAGT PAM)
aattctgcaatcctcactctg

SEQ ID NO: 1108 - RNA, 21 nt, synthetic construct
  source 1..21: mol_type = other RNA; note = RTT*2,4,6,8 (AG-to-AA PAM silencing edit)
aattctgcaatcctcattctg

SEQ ID NO: 1109 - RNA, 22 nt, synthetic construct
  source 1..22: mol_type = other RNA; note = PEgRNA spacer (GG;GGCAGT PAM)
aaattctgcaatcctcactctg

SEQ ID NO: 1110 - RNA, 22 nt, synthetic construct
  source 1..22: mol_type = other RNA; note = RTT*2,4,6,8 (AG-to-AA PAM silencing edit)
aaattctgcaatcctcattctg

SEQ ID NO: 1111 - RNA, 23 nt, synthetic construct
  source 1..23: mol_type = other RNA; note = RTT*1,3,5,7
caaattctgcaatcctcactctg

SEQ ID NO: 1112 - RNA, 23 nt, synthetic construct
  source 1..23: mol_type = other RNA; note = RTT*2,4,6,8 (AG-to-AA PAM silencing edit)
caaattctgcaatcctcattctg

SEQ ID NO: 1113 - RNA, 24 nt, synthetic construct
  source 1..24: mol_type = other RNA; note = RTT*1,3,5,7
acaaattctgcaatcctcactctg

SEQ ID NO: 1114 - RNA, 24 nt, synthetic construct
  source 1..24: mol_type = other RNA; note = RTT*2,4,6,8 (AG-to-AA PAM silencing edit)
acaaattctgcaatcctcattctg

SEQ ID NO: 1115 - RNA, 25 nt, synthetic construct
  source 1..25: mol_type = other RNA; note = RTT*1,3,5,7
aacaaattctgcaatcctcactctg

SEQ ID NO: 1116 - RNA, 25 nt, synthetic construct
  source 1..25: mol_type = other RNA; note = RTT*2,4,6,8 (AG-to-AA PAM silencing edit)
aacaaattctgcaatcctcattctg

SEQ ID NO: 1117 - RNA, 26 nt, synthetic construct
  source 1..26: mol_type = other RNA; note = RTT*1,3,5,7
gaacaaattctgcaatcctcactctg

SEQ ID NO: 1118 - RNA, 26 nt, synthetic construct
  source 1..26: mol_type = other RNA; note = RTT*2,4,6,8 (AG-to-AA PAM silencing edit)
gaacaaattctgcaatcctcattctg

SEQ ID NO: 1119 - RNA, 27 nt, synthetic construct
  source 1..27: mol_type = other RNA; note = RTT*1,3,5,7
tgaacaaattctgcaatcctcactctg

SEQ ID NO: 1120 - RNA, 27 nt, synthetic construct
  source 1..27: mol_type = other RNA; note = RTT*2,4,6,8 (AG-to-AA PAM silencing edit)
tgaacaaattctgcaatcctcattctg

SEQ ID NO: 1121 - RNA, 28 nt, synthetic construct
  source 1..28: mol_type = other RNA; note = RTT*1,3,5,7
gtgaacaaattctgcaatcctcactctg

SEQ ID NO: 1122 - RNA, 28 nt, synthetic construct
  source 1..28: mol_type = other RNA; note = RTT*2,4,6,8 (AG-to-AA PAM silencing edit)
gtgaacaaattctgcaatcctcattctg

SEQ ID NO: 1123 - RNA, 29 nt, synthetic construct
  source 1..29: mol_type = other RNA; note = RTT*1,3,5,7
agtgaacaaattctgcaatcctcactctg

SEQ ID NO: 1124 - RNA, 29 nt, synthetic construct
  source 1..29: mol_type = other RNA; note = RTT*2,4,6,8 (AG-to-AA PAM silencing edit)
agtgaacaaattctgcaatcctcattctg

SEQ ID NO: 1125 - RNA, 30 nt, synthetic construct
  source 1..30: mol_type = other RNA; note = RTT*1,3,5,7
cagtgaacaaattctgcaatcctcactctg

SEQ ID NO: 1126 - RNA, 30 nt, synthetic construct
  source 1..30: mol_type = other RNA; note = RTT*2,4,6,8 (AG-to-AA PAM silencing edit)
cagtgaacaaattctgcaatcctcattctg

SEQ ID NO: 1127 - RNA, 31 nt, synthetic construct
  source 1..31: mol_type = other RNA; note = RTT*1,3,5,7
tcagtgaacaaattctgcaatcctcactctg

SEQ ID NO: 1128 - RNA, 31 nt, synthetic construct
  source 1..31: mol_type = other RNA; note = RTT*2,4,6,8 (AG-to-AA PAM silencing edit)
tcagtgaacaaattctgcaatcctcattctg

SEQ ID NO: 1129 - RNA, 32 nt, synthetic construct
  source 1..32: mol_type = other RNA; note = RTT*1,3,5,7
ctcagtgaacaaattctgcaatcctcactctg

SEQ ID NO: 1130 - RNA, 32 nt, synthetic construct
  source 1..32: mol_type = other RNA; note = RTT*2,4,6,8 (AG-to-AA PAM silencing edit)
ctcagtgaacaaattctgcaatcctcattctg

SEQ ID NO: 1131 - RNA, 33 nt, synthetic construct
  source 1..33: mol_type = other RNA; note = RTT*1,3,5,7
gctcagtgaacaaattctgcaatcctcactctg

SEQ ID NO: 1132 - RNA, 33 nt, synthetic construct
  source 1..33: mol_type = other RNA; note = RTT*2,4,6,8 (AG-to-AA PAM silencing edit)
gctcagtgaacaaattctgcaatcctcattctg

SEQ ID NO: 1133 - RNA, 34 nt, synthetic construct
  source 1..34: mol_type = other RNA; note = RTT*1,3,5,7
ggctcagtgaacaaattctgcaatcctcactctg

SEQ ID NO: 1134 - RNA, 34 nt, synthetic construct
  source 1..34: mol_type = other RNA; note = RTT*2,4,6,8 (AG-to-AA PAM silencing edit)
ggctcagtgaacaaattctgcaatcctcattctg

SEQ ID NO: 1135 - RNA, 35 nt, synthetic construct
  source 1..35: mol_type = other RNA; note = RTT*1,3,5,7
tggctcagtgaacaaattctgcaatcctcactctg

SEQ ID NO: 1136 - RNA, 35 nt, synthetic construct
  source 1..35: mol_type = other RNA; note = RTT*2,4,6,8 (AG-to-AA PAM silencing edit)
tggctcagtgaacaaattctgcaatcctcattctg

SEQ ID NO: 1137 - RNA, 36 nt, synthetic construct
  source 1..36: mol_type = other RNA; note = RTT*1,3,5,7
atggctcagtgaacaaattctgcaatcctcactctg

SEQ ID NO: 1138 - RNA, 36 nt, synthetic construct
  source 1..36: mol_type = other RNA; note = RTT*2,4,6,8 (AG-to-AA PAM silencing edit)
atggctcagtgaacaaattctgcaatcctcattctg

SEQ ID NO: 1139 - RNA, 37 nt, synthetic construct
  source 1..37: mol_type = other RNA; note = RTT*1,3,5,7
catggctcagtgaacaaattctgcaatcctcactctg

SEQ ID NO: 1140 - RNA, 37 nt, synthetic construct
  source 1..37: mol_type = other RNA; note = RTT*2,4,6,8 (AG-to-AA PAM silencing edit)
catggctcagtgaacaaattctgcaatcctcattctg

SEQ ID NO: 1141 - RNA, 38 nt, synthetic construct
  source 1..38: mol_type = other RNA; note = RTT*1,3,5,7
ccatggctcagtgaacaaattctgcaatcctcactctg

SEQ ID NO: 1142 - RNA, 38 nt, synthetic construct
  source 1..38: mol_type = other RNA; note = RTT*2,4,6,8 (AG-to-AA PAM silencing edit)
ccatggctcagtgaacaaattctgcaatcctcattctg

SEQ ID NO: 1143 - RNA, 39 nt, synthetic construct
  source 1..39: mol_type = other RNA; note = RTT*1,3,5,7
tccatggctcagtgaacaaattctgcaatcctcactctg

SEQ ID NO: 1144 - RNA, 39 nt, synthetic construct
  source 1..39: mol_type = other RNA; note = RTT*2,4,6,8 (AG-to-AA PAM silencing edit)
tccatggctcagtgaacaaattctgcaatcctcattctg

SEQ ID NO: 1145 - RNA, 40 nt, synthetic construct
  source 1..40: mol_type = other RNA; note = RTT*1,3,5,7
ctccatggctcagtgaacaaattctgcaatcctcactctg

SEQ ID NO: 1146 - RNA, 40 nt, synthetic construct
  source 1..40: mol_type = other RNA; note = RTT*2,4,6,8 (AG-to-AA PAM silencing edit)
ctccatggctcagtgaacaaattctgcaatcctcattctg

SEQ ID NO: 1147 - RNA, 20 nt, synthetic construct
  source 1..20: mol_type = other RNA; note = PE3b*2 ngRNA spacer (TG PAM)
aaattctgcaatcctcattc

SEQ ID NO: 1148 - RNA, 20 nt, synthetic construct
  source 1..20: mol_type = other RNA; note = PE3b*4 ngRNA spacer (GG PAM)
aattctgcaatcctcattct

SEQ ID NO: 1149 - RNA, 20 nt, synthetic construct
  source 1..20: mol_type = other RNA; note = PE3b*8 ngRNA spacer (AG PAM)
ctgcaatcctcattctgggc

SEQ ID NO: 1150-1154 - skipped (5 entries)

SEQ ID NO: 1155 - RNA, 10 nt, synthetic construct
  source 1..10: mol_type = other RNA; note = PBS
gcagtgtgag

SEQ ID NO: 1156 - RNA, 11 nt, synthetic construct
  source 1..11: mol_type = other RNA; note = PBS
gcagtgtgagt

SEQ ID NO: 1157 - RNA, 12 nt, synthetic construct
  source 1..12: mol_type = other RNA; note = PBS
gcagtgtgagtg

SEQ ID NO: 1158 - RNA, 13 nt, synthetic construct
  source 1..13: mol_type = other RNA; note = PBS
gcagtgtgagtgc

SEQ ID NO: 1159 - RNA, 14 nt, synthetic construct
  source 1..14: mol_type = other RNA; note = PBS
gcagtgtgagtgca

SEQ ID NO: 1160 - RNA, 15 nt, synthetic construct
  source 1..15: mol_type = other RNA; note = PBS
gcagtgtgagtgcaa

SEQ ID NO: 1161 - RNA, 16 nt, synthetic construct
  source 1..16: mol_type = other RNA; note = PBS
gcagtgtgagtgcaaa

SEQ ID NO: 1162 - RNA, 18 nt, synthetic construct
  source 1..18: mol_type = other RNA; note = PBS
gcagtgtgagtgcaaaaa

SEQ ID NO: 1163 - RNA, 19 nt, synthetic construct
  source 1..19: mol_type = other RNA; note = PBS
gcagtgtgagtgcaaaaaa

SEQ ID NO: 1164 - RNA, 17 nt, synthetic construct
  source 1..17: mol_type = other RNA; note = PEgRNA spacer (GAG PAM)
tgcactcacactgccca

SEQ ID NO: 1165 - RNA, 18 nt, synthetic construct
  source 1..18: mol_type = other RNA; note = PEgRNA spacer (GAG PAM)
ttgcactcacactgccca

SEQ ID NO: 1166 - RNA, 19 nt, synthetic construct
  source 1..19: mol_type = other RNA; note = PEgRNA spacer (GAG PAM)
tttgcactcacactgccca

SEQ ID NO: 1167 - RNA, 21 nt, synthetic construct
  source 1..21: mol_type = other RNA; note = PEgRNA spacer (GAG PAM)
tttttgcactcacactgccca

SEQ ID NO: 1168 - RNA, 22 nt, synthetic construct
  source 1..22: mol_type = other RNA; note = PEgRNA spacer (GAG PAM)
ttttttgcactcacactgccca

SEQ ID NO: 1169 - RNA, 17 nt, synthetic construct
  source 1..17: mol_type = other RNA; note = RTT*3
tgcaatcctcactctgg

SEQ ID NO: 1170 - RNA, 17 nt, synthetic construct
  source 1..17: mol_type = other RNA; note = RTT*6 (GAG-to-GAA PAM silencing edit)
tgcaatcctcattctgg

SEQ ID NO: 1171 - RNA, 18 nt, synthetic construct
  source 1..18: mol_type = other RNA; note = RTT*3
ctgcaatcctcactctgg

SEQ ID NO: 1172 - RNA, 18 nt, synthetic construct
  source 1..18: mol_type = other RNA; note = RTT*6 (GAG-to-GAA PAM silencing edit)
ctgcaatcctcattctgg

SEQ ID NO: 1173 - RNA, 19 nt, synthetic construct
  source 1..19: mol_type = other RNA; note = RTT*3
tctgcaatcctcactctgg

SEQ ID NO: 1174 - RNA, 19 nt, synthetic construct
  source 1..19: mol_type = other RNA; note = RTT*6 (GAG-to-GAA PAM silencing edit)
tctgcaatcctcattctgg

SEQ ID NO: 1175 - RNA, 20 nt, synthetic construct
  source 1..20: mol_type = other RNA; note = RTT*1 (GAG-to-CTG PAM silencing edit)
ttctgcaatcctcacagcgg

SEQ ID NO: 1176 - RNA, 20 nt, synthetic construct
  source 1..20: mol_type = other RNA; note = RTT*2 (GAG-to-CTG PAM silencing edit)
ttctgcaatcctcacagtgg

SEQ ID NO: 1177 - RNA, 20 nt, synthetic construct
  source 1..20: mol_type = other RNA; note = RTT*3
ttctgcaatcctcactctgg

SEQ ID NO: 1178 - RNA, 20 nt, synthetic construct
  source 1..20: mol_type = other RNA; note = RTT*4 (GAG-to-CTA PAM silencing edit)
ttctgcaatcctcatagcgg

SEQ ID NO: 1179 - RNA, 20 nt, synthetic construct
  source 1..20: mol_type = other RNA; note = RTT*5 (GAG-to-CTA PAM silencing edit)
ttctgcaatcctcatagtgg

SEQ ID NO: 1180 - RNA, 20 nt, synthetic construct
  source 1..20: mol_type = other RNA; note = RTT*6 (GAG-to-GAA PAM silencing edit)
ttctgcaatcctcattctgg

SEQ ID NO: 1181 - RNA, 21 nt, synthetic construct
  source 1..21: mol_type = other RNA; note = RTT*1 (GAG-to-CTG PAM silencing edit)
attctgcaatcctcacagcgg

SEQ ID NO: 1182 - RNA, 21 nt, synthetic construct
  source 1..21: mol_type = other RNA; note = RTT*2 (GAG-to-CTG PAM silencing edit)
attctgcaatcctcacagtgg

SEQ ID NO: 1183 - RNA, 21 nt, synthetic construct
  source 1..21: mol_type = other RNA; note = RTT*3
attctgcaatcctcactctgg

SEQ ID NO: 1184 - RNA, 21 nt, synthetic construct
  source 1..21: mol_type = other RNA; note = RTT*4 (GAG-to-CTA PAM silencing edit)
attctgcaatcctcatagcgg

SEQ ID NO: 1185 - RNA, 21 nt, synthetic construct
  source 1..21: mol_type = other RNA; note = RTT*5 (GAG-to-CTA PAM silencing edit)
attctgcaatcctcatagtgg

SEQ ID NO: 1186 - RNA, 21 nt, synthetic construct
  source 1..21: mol_type = other RNA; note = RTT*6 (GAG-to-GAA PAM silencing edit)
attctgcaatcctcattctgg

SEQ ID NO: 1187 - RNA, 22 nt, synthetic construct
  source 1..22: mol_type = other RNA; note = RTT*1 (GAG-to-CTG PAM silencing edit)
aattctgcaatcctcacagcgg

SEQ ID NO: 1188 - RNA, 22 nt, synthetic construct
  source 1..22: mol_type = other RNA; note = RTT*2 (GAG-to-CTG PAM silencing edit)
aattctgcaatcctcacagtgg

SEQ ID NO: 1189 - RNA, 22 nt, synthetic construct
  source 1..22: mol_type = other RNA; note = RTT*3
aattctgcaatcctcactctgg

SEQ ID NO: 1190 - RNA, 22 nt, synthetic construct
  source 1..22: mol_type = other RNA; note = RTT*4 (GAG-to-CTA PAM silencing edit)
aattctgcaatcctcatagcgg

SEQ ID NO: 1191 - RNA, 22 nt, synthetic construct
  source 1..22: mol_type = other RNA; note = RTT*5 (GAG-to-CTA PAM silencing edit)
aattctgcaatcctcatagtgg

SEQ ID NO: 1192 - RNA, 22 nt, synthetic construct
  source 1..22: mol_type = other RNA; note = RTT*6 (GAG-to-GAA PAM silencing edit)
aattctgcaatcctcattctgg

SEQ ID NO: 1193 - RNA, 23 nt, synthetic construct
  source 1..23: mol_type = other RNA; note = RTT*1 (GAG-to-CTG PAM silencing edit)
aaattctgcaatcctcacagcgg

SEQ ID NO: 1194 - RNA, 23 nt, synthetic construct
  source 1..23: mol_type = other RNA; note = RTT*2 (GAG-to-CTG PAM silencing edit)
aaattctgcaatcctcacagtgg

SEQ ID NO: 1195 - RNA, 23 nt, synthetic construct
  source 1..23: mol_type = other RNA; note = RTT*3
aaattctgcaatcctcactctgg

SEQ ID NO: 1196 - RNA, 23 nt, synthetic construct
  source 1..23: mol_type = other RNA; note = RTT*4 (GAG-to-CTA PAM silencing edit)
aaattctgcaatcctcatagcgg

SEQ ID NO: 1197 - RNA, 23 nt, synthetic construct
  source 1..23: mol_type = other RNA; note = RTT*5 (GAG-to-CTA PAM silencing edit)
aaattctgcaatcctcatagtgg

SEQ ID NO: 1198 - RNA, 23 nt, synthetic construct
  source 1..23: mol_type = other RNA; note = RTT*6 (GAG-to-GAA PAM silencing edit)
aaattctgcaatcctcattctgg

SEQ ID NO: 1199 - RNA, 24 nt, synthetic construct
  source 1..24: mol_type = other RNA; note = RTT*1 (GAG-to-CTG PAM silencing edit)
caaattctgcaatcctcacagcgg

SEQ ID NO: 1200 - RNA, 24 nt, synthetic construct
  source 1..24: mol_type = other RNA; note = RTT*2 (GAG-to-CTG PAM silencing edit)
caaattctgcaatcctcacagtgg

SEQ ID NO: 1201 - RNA, 24 nt, synthetic construct
  source 1..24: mol_type = other RNA; note = RTT*3
caaattctgcaatcctcactctgg

SEQ ID NO: 1202 - RNA, 24 nt, synthetic construct
  source 1..24: mol_type = other RNA; note = RTT*4 (GAG-to-CTA PAM silencing edit)
caaattctgcaatcctcatagcgg

SEQ ID NO: 1203 - RNA, 24 nt, synthetic construct
  source 1..24: mol_type = other RNA; note = RTT*5 (GAG-to-CTA PAM silencing edit)
caaattctgcaatcctcatagtgg

SEQ ID NO: 1204 - RNA, 24 nt, synthetic construct
  source 1..24: mol_type = other RNA; note = RTT*6 (GAG-to-GAA PAM silencing edit)
caaattctgcaatcctcattctgg

SEQ ID NO: 1205 - RNA, 25 nt, synthetic construct
  source 1..25: mol_type = other RNA; note = RTT*1 (GAG-to-CTG PAM silencing edit)
acaaattctgcaatcctcacagcgg

SEQ ID NO: 1206 - RNA, 25 nt, synthetic construct
  source 1..25: mol_type = other RNA; note = RTT*2 (GAG-to-CTG PAM silencing edit)
acaaattctgcaatcctcacagtgg

SEQ ID NO: 1207 - RNA, 25 nt, synthetic construct
  source 1..25: mol_type = other RNA; note = RTT*3
acaaattctgcaatcctcactctgg

SEQ ID NO: 1208 - RNA, 25 nt, synthetic construct
  source 1..25: mol_type = other RNA; note = RTT*4 (GAG-to-CTA PAM silencing edit)
acaaattctgcaatcctcatagcgg

SEQ ID NO: 1209 - RNA, 25 nt, synthetic construct
  source 1..25: mol_type = other RNA; note = RTT*5 (GAG-to-CTA PAM silencing edit)
acaaattctgcaatcctcatagtgg

SEQ ID NO: 1210 - RNA, 25 nt, synthetic construct
  source 1..25: mol_type = other RNA; note = RTT*6 (GAG-to-GAA PAM silencing edit)
acaaattctgcaatcctcattctgg

SEQ ID NO: 1211 - RNA, 26 nt, synthetic construct
  source 1..26: mol_type = other RNA; note = RTT*1 (GAG-to-CTG PAM silencing edit)
aacaaattctgcaatcctcacagcgg

SEQ ID NO: 1212 - RNA, 26 nt, synthetic construct
  source 1..26: mol_type = other RNA; note = RTT*2 (GAG-to-CTG PAM silencing edit)
aacaaattctgcaatcctcacagtgg

SEQ ID NO: 1213 - RNA, 26 nt, synthetic construct
  source 1..26: mol_type = other RNA; note = RTT*3
aacaaattctgcaatcctcactctgg

SEQ ID NO: 1214 - RNA, 26 nt, synthetic construct
  source 1..26: mol_type = other RNA; note = RTT*4 (GAG-to-CTA PAM silencing edit)
aacaaattctgcaatcctcatagcgg

SEQ ID NO: 1215 - RNA, 26 nt, synthetic construct
  source 1..26: mol_type = other RNA; note = RTT*5 (GAG-to-CTA PAM silencing edit)
aacaaattctgcaatcctcatagtgg

SEQ ID NO: 1216 - RNA, 26 nt, synthetic construct
  source 1..26: mol_type = other RNA; note = RTT*6 (GAG-to-GAA PAM silencing edit)
aacaaattctgcaatcctcattctgg

SEQ ID NO: 1217 - RNA, 27 nt, synthetic construct
  source 1..27: mol_type = other RNA; note = RTT*1 (GAG-to-CTG PAM silencing edit)
gaacaaattctgcaatcctcacagcgg

SEQ ID NO: 1218 - RNA, 27 nt, synthetic construct
  source 1..27: mol_type = other RNA; note = RTT*2 (GAG-to-CTG PAM silencing edit)
gaacaaattctgcaatcctcacagtgg

SEQ ID NO: 1219 - RNA, 27 nt, synthetic construct
  source 1..27: mol_type = other RNA; note = RTT*3
gaacaaattctgcaatcctcactctgg

SEQ ID NO: 1220 - RNA, 27 nt, synthetic construct
  source 1..27: mol_type = other RNA; note = RTT*4 (GAG-to-CTA PAM silencing edit)
gaacaaattctgcaatcctcatagcgg

SEQ ID NO: 1221 - RNA, 27 nt, synthetic construct
  source 1..27: mol_type = other RNA; note = RTT*5 (GAG-to-CTA PAM silencing edit)
gaacaaattctgcaatcctcatagtgg

SEQ ID NO: 1222 - RNA, 27 nt, synthetic construct
  source 1..27: mol_type = other RNA; note = RTT*6 (GAG-to-GAA PAM silencing edit)
gaacaaattctgcaatcctcattctgg

SEQ ID NO: 1223 - RNA, 28 nt, synthetic construct
  source 1..28: mol_type = other RNA; note = RTT*1 (GAG-to-CTG PAM silencing edit)
tgaacaaattctgcaatcctcacagcgg

SEQ ID NO: 1224 - RNA, 28 nt, synthetic construct
  source 1..28: mol_type = other RNA; note = RTT*2 (GAG-to-CTG PAM silencing edit)
tgaacaaattctgcaatcctcacagtgg

SEQ ID NO: 1225 - RNA, 28 nt, synthetic construct
  source 1..28: mol_type = other RNA; note = RTT*3
tgaacaaattctgcaatcctcactctgg

SEQ ID NO: 1226 - RNA, 28 nt, synthetic construct
  source 1..28: mol_type = other RNA; note = RTT*4 (GAG-to-CTA PAM silencing edit)
tgaacaaattctgcaatcctcatagcgg

SEQ ID NO: 1227 - RNA, 28 nt, synthetic construct
  source 1..28: mol_type = other RNA; note = RTT*5 (GAG-to-CTA PAM silencing edit)
tgaacaaattctgcaatcctcatagtgg

SEQ ID NO: 1228 - RNA, 28 nt, synthetic construct
  source 1..28: mol_type = other RNA; note = RTT*6 (GAG-to-GAA PAM silencing edit)
tgaacaaattctgcaatcctcattctgg

SEQ ID NO: 1229 - RNA, 29 nt, synthetic construct
  source 1..29: mol_type = other RNA; note = RTT*1 (GAG-to-CTG PAM silencing edit)
gtgaacaaattctgcaatcctcacagcgg

SEQ ID NO: 1230 - RNA, 29 nt, synthetic construct
  source 1..29: mol_type = other RNA; note = RTT*2 (GAG-to-CTG PAM silencing edit)
gtgaacaaattctgcaatcctcacagtgg

SEQ ID NO: 1231 - RNA, 29 nt, synthetic construct
  source 1..29: mol_type = other RNA; note = RTT*3
gtgaacaaattctgcaatcctcactctgg

SEQ ID NO: 1232 - RNA, 29 nt, synthetic construct
  source 1..29: mol_type = other RNA; note = RTT*4 (GAG-to-CTA PAM silencing edit)
gtgaacaaattctgcaatcctcatagcgg

SEQ ID NO: 1233 - RNA, 29 nt, synthetic construct
  source 1..29: mol_type = other RNA; note = RTT*5 (GAG-to-CTA PAM silencing edit)
gtgaacaaattctgcaatcctcatagtgg

SEQ ID NO: 1234 - RNA, 29 nt, synthetic construct
  source 1..29: mol_type = other RNA; note = RTT*6 (GAG-to-GAA PAM silencing edit)
gtgaacaaattctgcaatcctcattctgg

SEQ ID NO: 1235 - RNA, 30 nt, synthetic construct
  source 1..30: mol_type = other RNA; note = RTT*1 (GAG-to-CTG PAM silencing edit)
agtgaacaaattctgcaatcctcacagcgg

SEQ ID NO: 1236 - RNA, 30 nt, synthetic construct
  source 1..30: mol_type = other RNA; note = RTT*2 (GAG-to-CTG PAM silencing edit)
agtgaacaaattctgcaatcctcacagtgg

SEQ ID NO: 1237 - RNA, 30 nt, synthetic construct
  source 1..30: mol_type = other RNA; note = RTT*3
agtgaacaaattctgcaatcctcactctgg

SEQ ID NO: 1238 - RNA, 30 nt, synthetic construct
  source 1..30: mol_type = other RNA; note = RTT*4 (GAG-to-CTA PAM silencing edit)
agtgaacaaattctgcaatcctcatagcgg

SEQ ID NO: 1239 - RNA, 30 nt, synthetic construct
  source 1..30: mol_type = other RNA; note = RTT*5 (GAG-to-CTA PAM silencing edit)
agtgaacaaattctgcaatcctcatagtgg

SEQ ID NO: 1240 - RNA, 30 nt, synthetic construct
  source 1..30: mol_type = other RNA; note = RTT*6 (GAG-to-GAA PAM silencing edit)
agtgaacaaattctgcaatcctcattctgg

SEQ ID NO: 1241 - RNA, 31 nt, synthetic construct
  source 1..31: mol_type = other RNA; note = RTT*1 (GAG-to-CTG PAM silencing edit)
cagtgaacaaattctgcaatcctcacagcgg

SEQ ID NO: 1242 - RNA, 31 nt, synthetic construct
  source 1..31: mol_type = other RNA; note = RTT*2 (GAG-to-CTG PAM silencing edit)
cagtgaacaaattctgcaatcctcacagtgg

SEQ ID NO: 1243 - RNA, 31 nt, synthetic construct
  source 1..31: mol_type = other RNA; note = RTT*3
cagtgaacaaattctgcaatcctcactctgg

SEQ ID NO: 1244 - RNA, 31 nt, synthetic construct
  source 1..31: mol_type = other RNA; note = RTT*4 (GAG-to-CTA PAM silencing edit)
cagtgaacaaattctgcaatcctcatagcgg

SEQ ID NO: 1245 - RNA, 31 nt, synthetic construct
  source 1..31: mol_type = other RNA; note = RTT*5 (GAG-to-CTA PAM silencing edit)
cagtgaacaaattctgcaatcctcatagtgg

SEQ ID NO: 1246 - RNA, 31 nt, synthetic construct
  source 1..31: mol_type = other RNA; note = RTT*6 (GAG-to-GAA PAM silencing edit)
cagtgaacaaattctgcaatcctcattctgg

SEQ ID NO: 1247 - RNA, 32 nt, synthetic construct
  source 1..32: mol_type = other RNA; note = RTT*1 (GAG-to-CTG PAM silencing edit)
tcagtgaacaaattctgcaatcctcacagcgg

SEQ ID NO: 1248 - RNA, 32 nt, synthetic construct
  source 1..32: mol_type = other RNA; note = RTT*2 (GAG-to-CTG PAM silencing edit)
tcagtgaacaaattctgcaatcctcacagtgg

SEQ ID NO: 1249 - RNA, 32 nt, synthetic construct
  source 1..32: mol_type = other RNA; note = RTT*3
tcagtgaacaaattctgcaatcctcactctgg

SEQ ID NO: 1250 - RNA, 32 nt, synthetic construct
  source 1..32: mol_type = other RNA; note = RTT*4 (GAG-to-CTA PAM silencing edit)
tcagtgaacaaattctgcaatcctcatagcgg

SEQ ID NO: 1251 - RNA, 32 nt, synthetic construct
  source 1..32: mol_type = other RNA; note = RTT*5 (GAG-to-CTA PAM silencing edit)
tcagtgaacaaattctgcaatcctcatagtgg

SEQ ID NO: 1252 - RNA, 32 nt, synthetic construct
  source 1..32: mol_type = other RNA; note = RTT*6 (GAG-to-GAA PAM silencing edit)
tcagtgaacaaattctgcaatcctcattctgg

SEQ ID NO: 1253 - RNA, 33 nt, synthetic construct
  source 1..33: mol_type = other RNA; note = RTT*1 (GAG-to-CTG PAM silencing edit)
ctcagtgaacaaattctgcaatcctcacagcgg

SEQ ID NO: 1254 - RNA, 33 nt, synthetic construct
  source 1..33: mol_type = other RNA; note = RTT*2 (GAG-to-CTG PAM silencing edit)
ctcagtgaacaaattctgcaatcctcacagtgg

SEQ ID NO: 1255 - RNA, 33 nt, synthetic construct
  source 1..33: mol_type = other RNA; note = RTT*3
ctcagtgaacaaattctgcaatcctcactctgg

SEQ ID NO: 1256 - RNA, 33 nt, synthetic construct
  source 1..33: mol_type = other RNA; note = RTT*4 (GAG-to-CTA PAM silencing edit)
ctcagtgaacaaattctgcaatcctcatagcgg

SEQ ID NO: 1257 - RNA, 33 nt, synthetic construct
  source 1..33: mol_type = other RNA; note = RTT*5 (GAG-to-CTA PAM silencing edit)
ctcagtgaacaaattctgcaatcctcatagtgg

SEQ ID NO: 1258 - RNA, 33 nt, synthetic construct
  source 1..33: mol_type = other RNA; note = RTT*6 (GAG-to-GAA PAM silencing edit)
ctcagtgaacaaattctgcaatcctcattctgg

SEQ ID NO: 1259 - RNA, 34 nt, synthetic construct
  source 1..34: mol_type = other RNA; note = RTT*1 (GAG-to-CTG PAM silencing edit)
gctcagtgaacaaattctgcaatcctcacagcgg

SEQ ID NO: 1260 - RNA, 34 nt, synthetic construct
  source 1..34: mol_type = other RNA; note = RTT*2 (GAG-to-CTG PAM silencing edit)
gctcagtgaacaaattctgcaatcctcacagtgg

SEQ ID NO: 1261 - RNA, 34 nt, synthetic construct
  source 1..34: mol_type = other RNA; note = RTT*3
gctcagtgaacaaattctgcaatcctcactctgg

SEQ ID NO: 1262 - RNA, 34 nt, synthetic construct
  source 1..34: mol_type = other RNA; note = RTT*4 (GAG-to-CTA PAM silencing edit)
gctcagtgaacaaattctgcaatcctcatagcgg

SEQ ID NO: 1263 - RNA, 34 nt, synthetic construct
  source 1..34: mol_type = other RNA; note = RTT*5 (GAG-to-CTA PAM silencing edit)
gctcagtgaacaaattctgcaatcctcatagtgg

SEQ ID NO: 1264 - RNA, 34 nt, synthetic construct
  source 1..34: mol_type = other RNA; note = RTT*6 (GAG-to-GAA PAM silencing edit)
gctcagtgaacaaattctgcaatcctcattctgg

SEQ ID NO: 1265 - RNA, 35 nt, synthetic construct
  source 1..35: mol_type = other RNA; note = RTT*1 (GAG-to-CTG PAM silencing edit)
ggctcagtgaacaaattctgcaatcctcacagcgg

SEQ ID NO: 1266 - RNA, 35 nt, synthetic construct
  source 1..35: mol_type = other RNA; note = RTT*2 (GAG-to-CTG PAM silencing edit)
ggctcagtgaacaaattctgcaatcctcacagtgg

SEQ ID NO: 1267 - RNA, 35 nt, synthetic construct
  source 1..35: mol_type = other RNA; note = RTT*3
ggctcagtgaacaaattctgcaatcctcactctgg

SEQ ID NO: 1268 - RNA, 35 nt, synthetic construct
  source 1..35: mol_type = other RNA; note = RTT*4 (GAG-to-CTA PAM silencing edit)
ggctcagtgaacaaattctgcaatcctcatagcgg

SEQ ID NO: 1269 - RNA, 35 nt, synthetic construct
  source 1..35: mol_type = other RNA; note = RTT*5 (GAG-to-CTA PAM silencing edit)
ggctcagtgaacaaattctgcaatcctcatagtgg

SEQ ID NO: 1270 - RNA, 35 nt, synthetic construct
  source 1..35: mol_type = other RNA; note = RTT*6 (GAG-to-GAA PAM silencing edit)
ggctcagtgaacaaattctgcaatcctcattctgg

SEQ ID NO: 1271 - RNA, 36 nt, synthetic construct
  source 1..36: mol_type = other RNA; note = RTT*1 (GAG-to-CTG PAM silencing edit)
tggctcagtgaacaaattctgcaatcctcacagcgg

SEQ ID NO: 1272 - RNA, 36 nt, synthetic construct
  source 1..36: mol_type = other RNA; note = RTT*2 (GAG-to-CTG PAM silencing edit)
tggctcagtgaacaaattctgcaatcctcacagtgg

SEQ ID NO: 1273 - RNA, 36 nt, synthetic construct
  source 1..36: mol_type = other RNA; note = RTT*3
tggctcagtgaacaaattctgcaatcctcactctgg

SEQ ID NO: 1274 - RNA, 36 nt, synthetic construct
  source 1..36: mol_type = other RNA; note = RTT*4 (GAG-to-CTA PAM silencing edit)
tggctcagtgaacaaattctgcaatcctcatagcgg

SEQ ID NO: 1275 - RNA, 36 nt, synthetic construct
  source 1..36: mol_type = other RNA; note = RTT*5 (GAG-to-CTA PAM silencing edit)
tggctcagtgaacaaattctgcaatcctcatagtgg

SEQ ID NO: 1276 - RNA, 36 nt, synthetic construct
  source 1..36: mol_type = other RNA; note = RTT*6 (GAG-to-GAA PAM silencing edit)
tggctcagtgaacaaattctgcaatcctcattctgg

SEQ ID NO: 1277 - RNA, 37 nt, synthetic construct
  source 1..37: mol_type = other RNA; note = RTT*1 (GAG-to-CTG PAM silencing edit)
atggctcagtgaacaaattctgcaatcctcacagcgg

SEQ ID NO: 1278 - RNA, 37 nt, synthetic construct
  source 1..37: mol_type = other RNA; note = RTT*2 (GAG-to-CTG PAM silencing edit)
atggctcagtgaacaaattctgcaatcctcacagtgg

SEQ ID NO: 1279 - RNA, 37 nt, synthetic construct
  source 1..37: mol_type = other RNA; note = RTT*3
atggctcagtgaacaaattctgcaatcctcactctgg

SEQ ID NO: 1280 - RNA, 37 nt, synthetic construct
  source 1..37: mol_type = other RNA; note = RTT*4 (GAG-to-CTA PAM silencing edit)
atggctcagtgaacaaattctgcaatcctcatagcgg

SEQ ID NO: 1281 - RNA, 37 nt, synthetic construct
  source 1..37: mol_type = other RNA; note = RTT*5 (GAG-to-CTA PAM silencing edit)
atggctcagtgaacaaattctgcaatcctcatagtgg

SEQ ID NO: 1282 - RNA, 37 nt, synthetic construct
  source 1..37: mol_type = other RNA; note = RTT*6 (GAG-to-GAA PAM silencing edit)
atggctcagtgaacaaattctgcaatcctcattctgg

SEQ ID NO: 1283 - RNA, 38 nt, synthetic construct
  source 1..38: mol_type = other RNA; note = RTT*1 (GAG-to-CTG PAM silencing edit)
catggctcagtgaacaaattctgcaatcctcacagcgg

SEQ ID NO: 1284 - RNA, 38 nt, synthetic construct
  source 1..38: mol_type = other RNA; note = RTT*2 (GAG-to-CTG PAM silencing edit)
catggctcagtgaacaaattctgcaatcctcacagtgg

SEQ ID NO: 1285 - RNA, 38 nt, synthetic construct
  source 1..38: mol_type = other RNA; note = RTT*3
catggctcagtgaacaaattctgcaatcctcactctgg

SEQ ID NO: 1286 - RNA, 38 nt, synthetic construct
  source 1..38: mol_type = other RNA; note = RTT*4 (GAG-to-CTA PAM silencing edit)
catggctcagtgaacaaattctgcaatcctcatagcgg

SEQ ID NO: 1287 - RNA, 38 nt, synthetic construct
  source 1..38: mol_type = other RNA; note = RTT*5 (GAG-to-CTA PAM silencing edit)
catggctcagtgaacaaattctgcaatcctcatagtgg

SEQ ID NO: 1288 - RNA, 38 nt, synthetic construct
  source 1..38: mol_type = other RNA; note = RTT*6 (GAG-to-GAA PAM silencing edit)
catggctcagtgaacaaattctgcaatcctcattctgg

SEQ ID NO: 1289 - RNA, 39 nt, synthetic construct
  source 1..39: mol_type = other RNA; note = RTT*1 (GAG-to-CTG PAM silencing edit)
ccatggctcagtgaacaaattctgcaatcctcacagcgg

SEQ ID NO: 1290 - RNA, 39 nt, synthetic construct
  source 1..39: mol_type = other RNA; note = RTT*2 (GAG-to-CTG PAM silencing edit)
ccatggctcagtgaacaaattctgcaatcctcacagtgg

SEQ ID NO: 1291 - RNA, 39 nt, synthetic construct
  source 1..39: mol_type = other RNA; note = RTT*3
ccatggctcagtgaacaaattctgcaatcctcactctgg

SEQ ID NO: 1292 - RNA, 39 nt, synthetic construct
  source 1..39: mol_type = other RNA; note = RTT*4 (GAG-to-CTA PAM silencing edit)
ccatggctcagtgaacaaattctgcaatcctcatagcgg

SEQ ID NO: 1293 - RNA, 39 nt, synthetic construct
  source 1..39: mol_type = other RNA; note = RTT*5 (GAG-to-CTA PAM silencing edit)
ccatggctcagtgaacaaattctgcaatcctcatagtgg

SEQ ID NO: 1294 - RNA, 39 nt, synthetic construct
  source 1..39: mol_type = other RNA; note = RTT*6 (GAG-to-GAA PAM silencing edit)
ccatggctcagtgaacaaattctgcaatcctcattctgg

SEQ ID NO: 1295 - RNA, 40 nt, synthetic construct
  source 1..40: mol_type = other RNA; note = RTT*1 (GAG-to-CTG PAM silencing edit)
tccatggctcagtgaacaaattctgcaatcctcacagcgg

SEQ ID NO: 1296 - RNA, 40 nt, synthetic construct
  source 1..40: mol_type = other RNA; note = RTT*2 (GAG-to-CTG PAM silencing edit)
tccatggctcagtgaacaaattctgcaatcctcacagtgg

SEQ ID NO: 1297 - RNA, 40 nt, synthetic construct
  source 1..40: mol_type = other RNA; note = RTT*3
tccatggctcagtgaacaaattctgcaatcctcactctgg

SEQ ID NO: 1298 - RNA, 40 nt, synthetic construct
  source 1..40: mol_type = other RNA; note = RTT*4 (GAG-to-CTA PAM silencing edit)
tccatggctcagtgaacaaattctgcaatcctcatagcgg

SEQ ID NO: 1299 - RNA, 40 nt, synthetic construct
  source 1..40: mol_type = other RNA; note = RTT*5 (GAG-to-CTA PAM silencing edit)
tccatggctcagtgaacaaattctgcaatcctcatagtgg

SEQ ID NO: 1300 - RNA, 40 nt, synthetic construct
  source 1..40: mol_type = other RNA; note = RTT*6 (GAG-to-GAA PAM silencing edit)
tccatggctcagtgaacaaattctgcaatcctcattctgg

SEQ ID NO: 1301 - RNA, 20 nt, synthetic construct
  source 1..20: mol_type = other RNA; note = PE3b*1 ngRNA spacer (CAG PAM)
tctgcaatcctcacagcggg

SEQ ID NO: 1302 - RNA, 20 nt, synthetic construct
  source 1..20: mol_type = other RNA; note = PE3b*2 ngRNA spacer (CAG PAM)
tctgcaatcctcacagtggg

SEQ ID NO: 1303 - RNA, 20 nt, synthetic construct
  source 1..20: mol_type = other RNA; note = PE3 ngRNA spacer (CAG PAM)
tctgcaatcctcactctggg

SEQ ID NO: 1304 - RNA, 20 nt, synthetic construct
  source 1..20: mol_type = other RNA; note = PE3b*4 ngRNA spacer (CAG PAM)
tctgcaatcctcatagcggg

SEQ ID NO: 1305 - RNA, 20 nt, synthetic construct
  source 1..20: mol_type = other RNA; note = PE3b*5 ngRNA spacer (CAG PAM)
tctgcaatcctcatagtggg

SEQ ID NO: 1306 - RNA, 20 nt, synthetic construct
  source 1..20: mol_type = other RNA; note = PE3b*6 ngRNA spacer (CAG PAM)
tctgcaatcctcattctggg

SEQ ID NO: 1307-1311 - skipped (5 entries)

SEQ ID NO: 1312 - RNA, 10 nt, synthetic construct
  source 1..10: mol_type = other RNA; note = PBS
cagtgtgagt

SEQ ID NO: 1313 - RNA, 11 nt, synthetic construct
  source 1..11: mol_type = other RNA; note = PBS
cagtgtgagtg

SEQ ID NO: 1314 - RNA, 12 nt, synthetic construct
  source 1..12: mol_type = other RNA; note = PBS
cagtgtgagtgc

SEQ ID NO: 1315 - RNA, 13 nt, synthetic construct
  source 1..13: mol_type = other RNA; note = PBS
cagtgtgagtgca

SEQ ID NO: 1316 - RNA, 14 nt, synthetic construct
  source 1..14: mol_type = other RNA; note = PBS
cagtgtgagtgcaa

SEQ ID NO: 1317 - RNA, 15 nt, synthetic construct
  source 1..15: mol_type = other RNA; note = PBS
cagtgtgagtgcaaa

SEQ ID NO: 1318 - RNA, 17 nt, synthetic construct
  source 1..17: mol_type = other RNA; note = PBS
cagtgtgagtgcaaaaa

SEQ ID NO: 1319 - RNA, 18 nt, synthetic construct
  source 1..18: mol_type = other RNA; note = PBS
cagtgtgagtgcaaaaaa

SEQ ID NO: 1320 - RNA, 19 nt, synthetic construct
  source 1..19: mol_type = other RNA; note = PBS
cagtgtgagtgcaaaaaag

SEQ ID NO: 1321 - RNA, 17 nt, synthetic construct
  source 1..17: mol_type = other RNA; note = RTT*1,3
ttgcactcacactgccc

SEQ ID NO: 1322 - RNA, 18 nt, synthetic construct
  source 1..18: mol_type = other RNA; note = RTT*1,3
tttgcactcacactgccc

SEQ ID NO: 1323 - RNA, 19 nt, synthetic construct
  source 1..19: mol_type = other RNA; note = RTT*1,3
ttttgcactcacactgccc

SEQ ID NO: 1324 - RNA, 20 nt, synthetic construct
  source 1..20: mol_type = other RNA; note = RTT*1,3
tttttgcactcacactgccc

SEQ ID NO: 1325 - RNA, 21 nt, synthetic construct
  source 1..21: mol_type = other RNA; note = RTT*1,3
ttttttgcactcacactgccc

SEQ ID NO: 1326 - RNA, 22 nt, synthetic construct
  source 1..22: mol_type = other RNA; note = RTT*1,3
cttttttgcactcacactgccc

SEQ ID NO: 1327 - RNA, 18 nt, synthetic construct
  source 1..18: mol_type = other RNA; note = PEgRNA spacer (CAG PAM)
tgcaatcctcactctggg

SEQ ID NO: 1328 - RNA, 19 nt, synthetic construct
  source 1..19: mol_type = other RNA; note = PEgRNA spacer (CAG PAM)
ctgcaatcctcactctggg

SEQ ID NO: 1329 - RNA, 21 nt, synthetic construct
  source 1..21: mol_type = other RNA; note = RTT*1,3,6,9,12 (AGA-to-GCT;AG-to- GC PAM silencing edit)
ttctgcaatcctcacagcggg

SEQ ID NO: 1330 - RNA, 21 nt, synthetic construct
  source 1..21: mol_type = other RNA; note = RTT*4,7,10,13 (AG-to-AC;AGA-to-ACT PAM silencing edit)
ttctgcaatcctcacagtggg

SEQ ID NO: 1331 - RNA, 21 nt, synthetic construct
  source 1..21: mol_type = other RNA; note = PEgRNA spacer (CAG PAM)
ttctgcaatcctcactctggg

SEQ ID NO: 1332 - RNA, 22 nt, synthetic construct
  source 1..22: mol_type = other RNA; note = RTT*1,3,6,9,12 (AGA-to-GCT;AG-to- GC PAM silencing edit)
attctgcaatcctcacagcggg

SEQ ID NO: 1333 - RNA, 22 nt, synthetic construct
  source 1..22: mol_type = other RNA; note = RTT*4,7,10,13 (AG-to-AC;AGA-to-ACT PAM silencing edit)
attctgcaatcctcacagtggg

SEQ ID NO: 1334 - RNA, 22 nt, synthetic construct
  source 1..22: mol_type = other RNA; note = PEgRNA spacer (CAG PAM)
attctgcaatcctcactctggg

SEQ ID NO: 1335 - RNA, 23 nt, synthetic construct
  source 1..23: mol_type = other RNA; note = RTT*1,3,6,9,12 (AGA-to-GCT;AG-to- GC PAM silencing edit)
aattctgcaatcctcacagcggg

SEQ ID NO: 1336 - RNA, 23 nt, synthetic construct
  source 1..23: mol_type = other RNA; note = RTT*4,7,10,13 (AG-to-AC;AGA-to-ACT PAM silencing edit)
aattctgcaatcctcacagtggg

SEQ ID NO: 1337 - RNA, 23 nt, synthetic construct
  source 1..23: mol_type = other RNA; note = RTT*2,5,8,11,14
aattctgcaatcctcactctggg

SEQ ID NO: 1338 - RNA, 24 nt, synthetic construct
  source 1..24: mol_type = other RNA; note = RTT*1,3,6,9,12 (AGA-to-GCT;AG-to- GC PAM silencing edit)
aaattctgcaatcctcacagcggg

SEQ ID NO: 1339 - RNA, 24 nt, synthetic construct
  source 1..24: mol_type = other RNA; note = RTT*4,7,10,13 (AG-to-AC;AGA-to-ACT PAM silencing edit)
aaattctgcaatcctcacagtggg

SEQ ID NO: 1340 - RNA, 24 nt, synthetic construct
  source 1..24: mol_type = other RNA; note = RTT*2,5,8,11,14
aaattctgcaatcctcactctggg

SEQ ID NO: 1341 - RNA, 25 nt, synthetic construct
  source 1..25: mol_type = other RNA; note = RTT*1,3,6,9,12 (AGA-to-GCT;AG-to- GC PAM silencing edit)
caaattctgcaatcctcacagcggg

SEQ ID NO: 1342 - RNA, 25 nt, synthetic construct
  source 1..25: mol_type = other RNA; note = RTT*4,7,10,13 (AG-to-AC;AGA-to-ACT PAM silencing edit)
caaattctgcaatcctcacagtggg

SEQ ID NO: 1343 - RNA, 25 nt, synthetic construct
  source 1..25: mol_type = other RNA; note = RTT*2,5,8,11,14
caaattctgcaatcctcactctggg

SEQ ID NO: 1344 - RNA, 26 nt, synthetic construct
  source 1..26: mol_type = other RNA; note = RTT*1,3,6,9,12 (AGA-to-GCT;AG-to- GC PAM silencing edit)
acaaattctgcaatcctcacagcggg

SEQ ID NO: 1345 - RNA, 26 nt, synthetic construct
  source 1..26: mol_type = other RNA; note = RTT*4,7,10,13 (AG-to-AC;AGA-to-ACT PAM silencing edit)
acaaattctgcaatcctcacagtggg

SEQ ID NO: 1346 - RNA, 26 nt, synthetic construct
  source 1..26: mol_type = other RNA; note = RTT*2,5,8,11,14
acaaattctgcaatcctcactctggg

SEQ ID NO: 1347 - RNA, 27 nt, synthetic construct
  source 1..27: mol_type = other RNA; note = RTT*1,3,6,9,12 (AGA-to-GCT;AG-to- GC PAM silencing edit)
aacaaattctgcaatcctcacagcggg

SEQ ID NO: 1348 - RNA, 27 nt, synthetic construct
  source 1..27: mol_type = other RNA; note = RTT*4,7,10,13 (AG-to-AC;AGA-to-ACT PAM silencing edit)
aacaaattctgcaatcctcacagtggg

SEQ ID NO: 1349 - RNA, 27 nt, synthetic construct
  source 1..27: mol_type = other RNA; note = RTT*2,5,8,11,14
aacaaattctgcaatcctcactctggg

SEQ ID NO: 1350 - RNA, 28 nt, synthetic construct
  source 1..28: mol_type = other RNA; note = RTT*1,3,6,9,12 (AGA-to-GCT;AG-to- GC PAM silencing edit)
gaacaaattctgcaatcctcacagcggg

SEQ ID NO: 1351 - RNA, 28 nt, synthetic construct
  source 1..28: mol_type = other RNA; note = RTT*4,7,10,13 (AG-to-AC;AGA-to-ACT PAM silencing edit)
gaacaaattctgcaatcctcacagtggg

SEQ ID NO: 1352 - RNA, 28 nt, synthetic construct
  source 1..28: mol_type = other RNA; note = RTT*2,5,8,11,14
gaacaaattctgcaatcctcactctggg

SEQ ID NO: 1353 - RNA, 29 nt, synthetic construct
  source 1..29: mol_type = other RNA; note = RTT*1,3,6,9,12 (AGA-to-GCT;AG-to- GC PAM silencing edit)
tgaacaaattctgcaatcctcacagcggg

SEQ ID NO: 1354 - RNA, 29 nt, synthetic construct
  source 1..29: mol_type = other RNA; note = RTT*4,7,10,13 (AG-to-AC;AGA-to-ACT PAM silencing edit)
tgaacaaattctgcaatcctcacagtggg

SEQ ID NO: 1355 - RNA, 29 nt, synthetic construct
  source 1..29: mol_type = other RNA; note = RTT*2,5,8,11,14
tgaacaaattctgcaatcctcactctggg

SEQ ID NO: 1356 - RNA, 30 nt, synthetic construct
  source 1..30: mol_type = other RNA; note = RTT*1,3,6,9,12 (AGA-to-GCT;AG-to- GC PAM silencing edit)
gtgaacaaattctgcaatcctcacagcggg

SEQ ID NO: 1357 - RNA, 30 nt, synthetic construct
  source 1..30: mol_type = other RNA; note = RTT*4,7,10,13 (AG-to-AC;AGA-to-ACT PAM silencing edit)
gtgaacaaattctgcaatcctcacagtggg

SEQ ID NO: 1358 - RNA, 30 nt, synthetic construct
  source 1..30: mol_type = other RNA; note = RTT*2,5,8,11,14
gtgaacaaattctgcaatcctcactctggg

SEQ ID NO: 1359 - RNA, 31 nt, synthetic construct
  source 1..31: mol_type = other RNA; note = RTT*1,3,6,9,12 (AGA-to-GCT;AG-to- GC PAM silencing edit)
agtgaacaaattctgcaatcctcacagcggg

SEQ ID NO: 1360 - RNA, 31 nt, synthetic construct
  source 1..31: mol_type = other RNA; note = RTT*4,7,10,13 (AG-to-AC;AGA-to-ACT PAM silencing edit)
agtgaacaaattctgcaatcctcacagtggg

SEQ ID NO: 1361 - RNA, 31 nt, synthetic construct
  source 1..31: mol_type = other RNA; note = RTT*2,5,8,11,14
agtgaacaaattctgcaatcctcactctggg

SEQ ID NO: 1362 - RNA, 32 nt, synthetic construct
  source 1..32: mol_type = other RNA; note = RTT*1,3,6,9,12 (AGA-to-GCT;AG-to- GC PAM silencing edit)
cagtgaacaaattctgcaatcctcacagcggg

SEQ ID NO: 1363 - RNA, 32 nt, synthetic construct
  source 1..32: mol_type = other RNA; note = RTT*4,7,10,13 (AG-to-AC;AGA-to-ACT PAM silencing edit)
cagtgaacaaattctgcaatcctcacagtggg

SEQ ID NO: 1364 - RNA, 32 nt, synthetic construct
  source 1..32: mol_type = other RNA; note = RTT*2,5,8,11,14
cagtgaacaaattctgcaatcctcactctggg

SEQ ID NO: 1365 - RNA, 33 nt, synthetic construct
  source 1..33: mol_type = other RNA; note = RTT*1,3,6,9,12 (AGA-to-GCT;AG-to- GC PAM silencing edit)
tcagtgaacaaattctgcaatcctcacagcggg

SEQ ID NO: 1366 - RNA, 33 nt, synthetic construct
  source 1..33: mol_type = other RNA; note = RTT*4,7,10,13 (AG-to-AC;AGA-to-ACT PAM silencing edit)
tcagtgaacaaattctgcaatcctcacagtggg

SEQ ID NO: 1367 - RNA, 33 nt, synthetic construct
  source 1..33: mol_type = other RNA; note = RTT*2,5,8,11,14
tcagtgaacaaattctgcaatcctcactctggg

SEQ ID NO: 1368 - RNA, 34 nt, synthetic construct
  source 1..34: mol_type = other RNA; note = RTT*1,3,6,9,12 (AGA-to-GCT;AG-to- GC PAM silencing edit)
ctcagtgaacaaattctgcaatcctcacagcggg

SEQ ID NO: 1369 - RNA, 34 nt, synthetic construct
  source 1..34: mol_type = other RNA; note = RTT*4,7,10,13 (AG-to-AC;AGA-to-ACT PAM silencing edit)
ctcagtgaacaaattctgcaatcctcacagtggg

SEQ ID NO: 1370 - RNA, 34 nt, synthetic construct
  source 1..34: mol_type = other RNA; note = RTT*2,5,8,11,14
ctcagtgaacaaattctgcaatcctcactctggg

SEQ ID NO: 1371 - RNA, 35 nt, synthetic construct
  source 1..35: mol_type = other RNA; note = RTT*1,3,6,9,12 (AGA-to-GCT;AG-to- GC PAM silencing edit)
gctcagtgaacaaattctgcaatcctcacagcggg

SEQ ID NO: 1372 - RNA, 35 nt, synthetic construct
  source 1..35: mol_type = other RNA; note = RTT*4,7,10,13 (AG-to-AC;AGA-to-ACT PAM silencing edit)
gctcagtgaacaaattctgcaatcctcacagtggg

SEQ ID NO: 1373 - RNA, 35 nt, synthetic construct
  source 1..35: mol_type = other RNA; note = RTT*2,5,8,11,14
gctcagtgaacaaattctgcaatcctcactctggg

SEQ ID NO: 1374 - RNA, 36 nt, synthetic construct
  source 1..36: mol_type = other RNA; note = RTT*1,3,6,9,12 (AGA-to-GCT;AG-to- GC PAM silencing edit)
ggctcagtgaacaaattctgcaatcctcacagcggg

SEQ ID NO: 1375 - RNA, 36 nt, synthetic construct
  source 1..36: mol_type = other RNA; note = RTT*4,7,10,13 (AG-to-AC;AGA-to-ACT PAM silencing edit)
ggctcagtgaacaaattctgcaatcctcacagtggg

SEQ ID NO: 1376 - RNA, 36 nt, synthetic construct
  source 1..36: mol_type = other RNA; note = RTT*2,5,8,11,14
ggctcagtgaacaaattctgcaatcctcactctggg

SEQ ID NO: 1377 - RNA, 37 nt, synthetic construct
  source 1..37: mol_type = other RNA; note = RTT*1,3,6,9,12 (AGA-to-GCT;AG-to- GC PAM silencing edit)
tggctcagtgaacaaattctgcaatcctcacagcggg

SEQ ID NO: 1378 - RNA, 37 nt, synthetic construct
  source 1..37: mol_type = other RNA; note = RTT*4,7,10,13 (AG-to-AC;AGA-to-ACT PAM silencing edit)
tggctcagtgaacaaattctgcaatcctcacagtggg

SEQ ID NO: 1379 - RNA, 37 nt, synthetic construct
  source 1..37: mol_type = other RNA; note = RTT*2,5,8,11,14
tggctcagtgaacaaattctgcaatcctcactctggg

SEQ ID NO: 1380 - RNA, 38 nt, synthetic construct
  source 1..38: mol_type = other RNA; note = RTT*1,3,6,9,12 (AGA-to-GCT;AG-to- GC PAM silencing edit)
atggctcagtgaacaaattctgcaatcctcacagcggg

SEQ ID NO: 1381 - RNA, 38 nt, synthetic construct
  source 1..38: mol_type = other RNA; note = RTT*4,7,10,13 (AG-to-AC;AGA-to-ACT PAM silencing edit)
atggctcagtgaacaaattctgcaatcctcacagtggg

SEQ ID NO: 1382 - RNA, 38 nt, synthetic construct
  source 1..38: mol_type = other RNA; note = RTT*2,5,8,11,14
atggctcagtgaacaaattctgcaatcctcactctggg

SEQ ID NO: 1383 - RNA, 39 nt, synthetic construct
  source 1..39: mol_type = other RNA; note = RTT*1,3,6,9,12 (AGA-to-GCT;AG-to- GC PAM silencing edit)
catggctcagtgaacaaattctgcaatcctcacagcggg

SEQ ID NO: 1384 - RNA, 39 nt, synthetic construct
  source 1..39: mol_type = other RNA; note = RTT*4,7,10,13 (AG-to-AC;AGA-to-ACT PAM silencing edit)
catggctcagtgaacaaattctgcaatcctcacagtggg

SEQ ID NO: 1385 - RNA, 39 nt, synthetic construct
  source 1..39: mol_type = other RNA; note = RTT*2,5,8,11,14
catggctcagtgaacaaattctgcaatcctcactctggg

SEQ ID NO: 1386 - RNA, 40 nt, synthetic construct
  source 1..40: mol_type = other RNA; note = RTT*1,3,6,9,12 (AGA-to-GCT;AG-to- GC PAM silencing edit)
ccatggctcagtgaacaaattctgcaatcctcacagcggg

SEQ ID NO: 1387 - RNA, 40 nt, synthetic construct
  source 1..40: mol_type = other RNA; note = RTT*4,7,10,13 (AG-to-AC;AGA-to-ACT PAM silencing edit)
ccatggctcagtgaacaaattctgcaatcctcacagtggg

SEQ ID NO: 1388 - RNA, 40 nt, synthetic construct
  source 1..40: mol_type = other RNA; note = RTT*2,5,8,11,14
ccatggctcagtgaacaaattctgcaatcctcactctggg

SEQ ID NO: 1389 - RNA, 20 nt, synthetic construct
  source 1..20: mol_type = other RNA; note = PE3b*1 ngRNA spacer (TG PAM)
aaattctgcaatcctcacag

SEQ ID NO: 1390 - RNA, 20 nt, synthetic construct
  source 1..20: mol_type = other RNA; note = PE3b*3 ngRNA spacer (GG PAM)
aattctgcaatcctcacagc

SEQ ID NO: 1391 - RNA, 20 nt, synthetic construct
  source 1..20: mol_type = other RNA; note = PE3b*4 ngRNA spacer (GG PAM)
aattctgcaatcctcacagt

SEQ ID NO: 1392 - RNA, 20 nt, synthetic construct
  source 1..20: mol_type = other RNA; note = PE3b*6 ngRNA spacer (GG PAM)
attctgcaatcctcacagcg

SEQ ID NO: 1393 - RNA, 20 nt, synthetic construct
  source 1..20: mol_type = other RNA; note = PE3b*7 ngRNA spacer (GG PAM)
attctgcaatcctcacagtg

SEQ ID NO: 1394 - RNA, 20 nt, synthetic construct
  source 1..20: mol_type = other RNA; note = PE3b*9 ngRNA spacer (AG PAM)
ctgcaatcctcacagcgggc

SEQ ID NO: 1395 - RNA, 20 nt, synthetic construct
  source 1..20: mol_type = other RNA; note = PE3b*10 ngRNA spacer (AG PAM)
ctgcaatcctcacagtgggc

SEQ ID NO: 1396 - RNA, 20 nt, synthetic construct
  source 1..20: mol_type = other RNA; note = PE3b*12 ngRNA spacer (TG PAM)
gcaatcctcacagcgggcag

SEQ ID NO: 1397 - RNA, 20 nt, synthetic construct
  source 1..20: mol_type = other RNA; note = PE3b*13 ngRNA spacer (TG PAM)
gcaatcctcacagtgggcag

SEQ ID NO: 1398-1402 - skipped (5 entries)

SEQ ID NO: 1403 - RNA, 10 nt, synthetic construct
  source 1..10: mol_type = other RNA; note = PBS
agtgtgagtg

SEQ ID NO: 1404 - RNA, 11 nt, synthetic construct
  source 1..11: mol_type = other RNA; note = PBS
agtgtgagtgc

SEQ ID NO: 1405 - RNA, 12 nt, synthetic construct
  source 1..12: mol_type = other RNA; note = PBS
agtgtgagtgca

SEQ ID NO: 1406 - RNA, 13 nt, synthetic construct
  source 1..13: mol_type = other RNA; note = PBS
agtgtgagtgcaa

SEQ ID NO: 1407 - RNA, 14 nt, synthetic construct
  source 1..14: mol_type = other RNA; note = PBS
agtgtgagtgcaaa

SEQ ID NO: 1408 - RNA, 16 nt, synthetic construct
  source 1..16: mol_type = other RNA; note = PBS
agtgtgagtgcaaaaa

SEQ ID NO: 1409 - RNA, 17 nt, synthetic construct
  source 1..17: mol_type = other RNA; note = PBS
agtgtgagtgcaaaaaa

SEQ ID NO: 1410 - RNA, 18 nt, synthetic construct
  source 1..18: mol_type = other RNA; note = PBS
agtgtgagtgcaaaaaag

SEQ ID NO: 1411 - RNA, 19 nt, synthetic construct
  source 1..19: mol_type = other RNA; note = PBS
agtgtgagtgcaaaaaaga

SEQ ID NO: 1412 - RNA, 17 nt, synthetic construct
  source 1..17: mol_type = other RNA; note = RTT*1,3,5
tttgcactcacactgcc

SEQ ID NO: 1413 - RNA, 18 nt, synthetic construct
  source 1..18: mol_type = other RNA; note = RTT*1,3,5
ttttgcactcacactgcc

SEQ ID NO: 1414 - RNA, 19 nt, synthetic construct
  source 1..19: mol_type = other RNA; note = RTT*1,3,5
tttttgcactcacactgcc

SEQ ID NO: 1415 - RNA, 21 nt, synthetic construct
  source 1..21: mol_type = other RNA; note = RTT*1,3,5
cttttttgcactcacactgcc

SEQ ID NO: 1416 - RNA, 22 nt, synthetic construct
  source 1..22: mol_type = other RNA; note = RTT*1,3,5
tcttttttgcactcacactgcc

SEQ ID NO: 1417 - RNA, 19 nt, synthetic construct
  source 1..19: mol_type = other RNA; note = RTT*1,4 (CAG-to-CGC;CAGAGT-to- CGCTGT PAM silencing edit)
tgcaatcctcacagcgggc

SEQ ID NO: 1418 - RNA, 19 nt, synthetic construct
  source 1..19: mol_type = other RNA; note = PEgRNA spacer (AG PAM)
tgcaatcctcactctgggc

SEQ ID NO: 1419 - RNA, 21 nt, synthetic construct
  source 1..21: mol_type = other RNA; note = RTT*1,4 (CAG-to-CGC;CAGAGT-to- CGCTGT PAM silencing edit)
tctgcaatcctcacagcgggc

SEQ ID NO: 1420 - RNA, 21 nt, synthetic construct
  source 1..21: mol_type = other RNA; note = PEgRNA spacer (AG PAM)
tctgcaatcctcactctgggc

SEQ ID NO: 1421 - RNA, 22 nt, synthetic construct
  source 1..22: mol_type = other RNA; note = RTT*1,4 (CAG-to-CGC;CAGAGT-to- CGCTGT PAM silencing edit)
ttctgcaatcctcacagcgggc

SEQ ID NO: 1422 - RNA, 22 nt, synthetic construct
  source 1..22: mol_type = other RNA; note = RTT*2,5 (CAG-to-CAC;CAGAGT-to- CACTGT PAM silencing edit)
ttctgcaatcctcacagtgggc

SEQ ID NO: 1423 - RNA, 22 nt, synthetic construct
  source 1..22: mol_type = other RNA; note = RTT*6 (CAG-to-CTG PAM silencing edit)
ttctgcaatcctcactcagggc

SEQ ID NO: 1424 - RNA, 22 nt, synthetic construct
  source 1..22: mol_type = other RNA; note = RTT*7 (CAG-to-CGG PAM silencing edit)
ttctgcaatcctcactccgggc

SEQ ID NO: 1425 - RNA, 22 nt, synthetic construct
  source 1..22: mol_type = other RNA; note = RTT*8 (CAG-to-CCG PAM silencing edit)
ttctgcaatcctcactcggggc

SEQ ID NO: 1426 - RNA, 22 nt, synthetic construct
  source 1..22: mol_type = other RNA; note = PEgRNA spacer (AG PAM)
ttctgcaatcctcactctgggc

SEQ ID NO: 1427 - RNA, 23 nt, synthetic construct
  source 1..23: mol_type = other RNA; note = RTT*1,4 (CAG-to-CGC;CAGAGT-to- CGCTGT PAM silencing edit)
attctgcaatcctcacagcgggc

SEQ ID NO: 1428 - RNA, 23 nt, synthetic construct
  source 1..23: mol_type = other RNA; note = RTT*2,5 (CAG-to-CAC;CAGAGT-to- CACTGT PAM silencing edit)
attctgcaatcctcacagtgggc

SEQ ID NO: 1429 - RNA, 23 nt, synthetic construct
  source 1..23: mol_type = other RNA; note = RTT*6 (CAG-to-CTG PAM silencing edit)
attctgcaatcctcactcagggc

SEQ ID NO: 1430 - RNA, 23 nt, synthetic construct
  source 1..23: mol_type = other RNA; note = RTT*7 (CAG-to-CGG PAM silencing edit)
attctgcaatcctcactccgggc

SEQ ID NO: 1431 - RNA, 23 nt, synthetic construct
  source 1..23: mol_type = other RNA; note = RTT*8 (CAG-to-CCG PAM silencing edit)
attctgcaatcctcactcggggc

SEQ ID NO: 1432 - RNA, 23 nt, synthetic construct
  source 1..23: mol_type = other RNA; note = RTT*3,9
attctgcaatcctcactctgggc

SEQ ID NO: 1433 - RNA, 24 nt, synthetic construct
  source 1..24: mol_type = other RNA; note = RTT*1,4 (CAG-to-CGC;CAGAGT-to- CGCTGT PAM silencing edit)
aattctgcaatcctcacagcgggc

SEQ ID NO: 1434 - RNA, 24 nt, synthetic construct
  source 1..24: mol_type = other RNA; note = RTT*2,5 (CAG-to-CAC;CAGAGT-to- CACTGT PAM silencing edit)
aattctgcaatcctcacagtgggc

SEQ ID NO: 1435 - RNA, 24 nt, synthetic construct
  source 1..24: mol_type = other RNA; note = RTT*6 (CAG-to-CTG PAM silencing edit)
aattctgcaatcctcactcagggc

SEQ ID NO: 1436 - RNA, 24 nt, synthetic construct
  source 1..24: mol_type = other RNA; note = RTT*7 (CAG-to-CGG PAM silencing edit)
aattctgcaatcctcactccgggc

SEQ ID NO: 1437 - RNA, 24 nt, synthetic construct
  source 1..24: mol_type = other RNA; note = RTT*8 (CAG-to-CCG PAM silencing edit)
aattctgcaatcctcactcggggc

SEQ ID NO: 1438 - RNA, 24 nt, synthetic construct
  source 1..24: mol_type = other RNA; note = RTT*3,9
aattctgcaatcctcactctgggc

SEQ ID NO: 1439 - RNA, 25 nt, synthetic construct
  source 1..25: mol_type = other RNA; note = RTT*1,4 (CAG-to-CGC;CAGAGT-to- CGCTGT PAM silencing edit)
aaattctgcaatcctcacagcgggc

SEQ ID NO: 1440 - RNA, 25 nt, synthetic construct
  source 1..25: mol_type = other RNA; note = RTT*2,5 (CAG-to-CAC;CAGAGT-to- CACTGT PAM silencing edit)
aaattctgcaatcctcacagtgggc

SEQ ID NO: 1441 - RNA, 25 nt, synthetic construct
  source 1..25: mol_type = other RNA; note = RTT*6 (CAG-to-CTG PAM silencing edit)
aaattctgcaatcctcactcagggc

SEQ ID NO: 1442 - RNA, 25 nt, synthetic construct
  source 1..25: mol_type = other RNA; note = RTT*7 (CAG-to-CGG PAM silencing edit)
aaattctgcaatcctcactccgggc

SEQ ID NO: 1443 - RNA, 25 nt, synthetic construct
  source 1..25: mol_type = other RNA; note = RTT*8 (CAG-to-CCG PAM silencing edit)
aaattctgcaatcctcactcggggc

SEQ ID NO: 1444 - RNA, 25 nt, synthetic construct
  source 1..25: mol_type = other RNA; note = RTT*3,9
aaattctgcaatcctcactctgggc

SEQ ID NO: 1445 - RNA, 26 nt, synthetic construct
  source 1..26: mol_type = other RNA; note = RTT*1,4 (CAG-to-CGC;CAGAGT-to- CGCTGT PAM silencing edit)
caaattctgcaatcctcacagcgggc

SEQ ID NO: 1446 - RNA, 26 nt, synthetic construct
  source 1..26: mol_type = other RNA; note = RTT*2,5 (CAG-to-CAC;CAGAGT-to- CACTGT PAM silencing edit)
caaattctgcaatcctcacagtgggc

SEQ ID NO: 1447 - RNA, 26 nt, synthetic construct
  source 1..26: mol_type = other RNA; note = RTT*6 (CAG-to-CTG PAM silencing edit)
caaattctgcaatcctcactcagggc

SEQ ID NO: 1448 - RNA, 26 nt, synthetic construct
  source 1..26: mol_type = other RNA; note = RTT*7 (CAG-to-CGG PAM silencing edit)
caaattctgcaatcctcactccgggc

SEQ ID NO: 1449 - RNA, 26 nt, synthetic construct
  source 1..26: mol_type = other RNA; note = RTT*8 (CAG-to-CCG PAM silencing edit)
caaattctgcaatcctcactcggggc

SEQ ID NO: 1450 - RNA, 26 nt, synthetic construct
  source 1..26: mol_type = other RNA; note = RTT*3,9
caaattctgcaatcctcactctgggc

SEQ ID NO: 1451 - RNA, 27 nt, synthetic construct
  source 1..27: mol_type = other RNA; note = RTT*1,4 (CAG-to-CGC;CAGAGT-to- CGCTGT PAM silencing edit)
acaaattctgcaatcctcacagcgggc

SEQ ID NO: 1452 - RNA, 27 nt, synthetic construct
  source 1..27: mol_type = other RNA; note = RTT*2,5 (CAG-to-CAC;CAGAGT-to- CACTGT PAM silencing edit)
acaaattctgcaatcctcacagtgggc

SEQ ID NO: 1453 - RNA, 27 nt, synthetic construct
  source 1..27: mol_type = other RNA; note = RTT*6 (CAG-to-CTG PAM silencing edit)
acaaattctgcaatcctcactcagggc

SEQ ID NO: 1454 - RNA, 27 nt, synthetic construct
  source 1..27: mol_type = other RNA; note = RTT*7 (CAG-to-CGG PAM silencing edit)
acaaattctgcaatcctcactccgggc

SEQ ID NO: 1455 - RNA, 27 nt, synthetic construct
  source 1..27: mol_type = other RNA; note = RTT*8 (CAG-to-CCG PAM silencing edit)
acaaattctgcaatcctcactcggggc

SEQ ID NO: 1456 - RNA, 27 nt, synthetic construct
  source 1..27: mol_type = other RNA; note = RTT*3,9
acaaattctgcaatcctcactctgggc

SEQ ID NO: 1457 - RNA, 28 nt, synthetic construct
  source 1..28: mol_type = other RNA; note = RTT*1,4 (CAG-to-CGC;CAGAGT-to- CGCTGT PAM silencing edit)
aacaaattctgcaatcctcacagcgggc

SEQ ID NO: 1458 - RNA, 28 nt, synthetic construct
  source 1..28: mol_type = other RNA; note = RTT*2,5 (CAG-to-CAC;CAGAGT-to- CACTGT PAM silencing edit)
aacaaattctgcaatcctcacagtgggc

SEQ ID NO: 1459 - RNA, 28 nt, synthetic construct
  source 1..28: mol_type = other RNA; note = RTT*6 (CAG-to-CTG PAM silencing edit)
aacaaattctgcaatcctcactcagggc

SEQ ID NO: 1460 - RNA, 28 nt, synthetic construct
  source 1..28: mol_type = other RNA; note = RTT*7 (CAG-to-CGG PAM silencing edit)
aacaaattctgcaatcctcactccgggc

SEQ ID NO: 1461 - RNA, 28 nt, synthetic construct
  source 1..28: mol_type = other RNA; note = RTT*8 (CAG-to-CCG PAM silencing edit)
aacaaattctgcaatcctcactcggggc

SEQ ID NO: 1462 - RNA, 28 nt, synthetic construct
  source 1..28: mol_type = other RNA; note = RTT*3,9
aacaaattctgcaatcctcactctgggc

SEQ ID NO: 1463 - RNA, 29 nt, synthetic construct
  source 1..29: mol_type = other RNA; note = RTT*1,4 (CAG-to-CGC;CAGAGT-to- CGCTGT PAM silencing edit)
gaacaaattctgcaatcctcacagcgggc

SEQ ID NO: 1464 - RNA, 29 nt, synthetic construct
  source 1..29: mol_type = other RNA; note = RTT*2,5 (CAG-to-CAC;CAGAGT-to- CACTGT PAM silencing edit)
gaacaaattctgcaatcctcacagtgggc

SEQ ID NO: 1465 - RNA, 29 nt, synthetic construct
  source 1..29: mol_type = other RNA; note = RTT*6 (CAG-to-CTG PAM silencing edit)
gaacaaattctgcaatcctcactcagggc

SEQ ID NO: 1466 - RNA, 29 nt, synthetic construct
  source 1..29: mol_type = other RNA; note = RTT*7 (CAG-to-CGG PAM silencing edit)
gaacaaattctgcaatcctcactccgggc

SEQ ID NO: 1467 - RNA, 29 nt, synthetic construct
  source 1..29: mol_type = other RNA; note = RTT*8 (CAG-to-CCG PAM silencing edit)
gaacaaattctgcaatcctcactcggggc

SEQ ID NO: 1468 - RNA, 29 nt, synthetic construct
  source 1..29: mol_type = other RNA; note = RTT*3,9
gaacaaattctgcaatcctcactctgggc

SEQ ID NO: 1469 - RNA, 30 nt, synthetic construct
  source 1..30: mol_type = other RNA; note = RTT*1,4 (CAG-to-CGC;CAGAGT-to- CGCTGT PAM silencing edit)
tgaacaaattctgcaatcctcacagcgggc

SEQ ID NO: 1470 - RNA, 30 nt, synthetic construct
  source 1..30: mol_type = other RNA; note = RTT*2,5 (CAG-to-CAC;CAGAGT-to- CACTGT PAM silencing edit)
tgaacaaattctgcaatcctcacagtgggc

SEQ ID NO: 1471 - RNA, 30 nt, synthetic construct
  source 1..30: mol_type = other RNA; note = RTT*6 (CAG-to-CTG PAM silencing edit)
tgaacaaattctgcaatcctcactcagggc

SEQ ID NO: 1472 - RNA, 30 nt, synthetic construct
  source 1..30: mol_type = other RNA; note = RTT*7 (CAG-to-CGG PAM silencing edit)
tgaacaaattctgcaatcctcactccgggc

SEQ ID NO: 1473 - RNA, 30 nt, synthetic construct
  source 1..30: mol_type = other RNA; note = RTT*8 (CAG-to-CCG PAM silencing edit)
tgaacaaattctgcaatcctcactcggggc

SEQ ID NO: 1474 - RNA, 30 nt, synthetic construct
  source 1..30: mol_type = other RNA; note = RTT*3,9
tgaacaaattctgcaatcctcactctgggc

SEQ ID NO: 1475 - RNA, 31 nt, synthetic construct
  source 1..31: mol_type = other RNA; note = RTT*1,4 (CAG-to-CGC;CAGAGT-to- CGCTGT PAM silencing edit)
gtgaacaaattctgcaatcctcacagcgggc

SEQ ID NO: 1476 - RNA, 31 nt, synthetic construct
  source 1..31: mol_type = other RNA; note = RTT*2,5 (CAG-to-CAC;CAGAGT-to- CACTGT PAM silencing edit)
gtgaacaaattctgcaatcctcacagtgggc

SEQ ID NO: 1477 - RNA, 31 nt, synthetic construct
  source 1..31: mol_type = other RNA; note = RTT*6 (CAG-to-CTG PAM silencing edit)
gtgaacaaattctgcaatcctcactcagggc

SEQ ID NO: 1478 - RNA, 31 nt, synthetic construct
  source 1..31: mol_type = other RNA; note = RTT*7 (CAG-to-CGG PAM silencing edit)
gtgaacaaattctgcaatcctcactccgggc

SEQ ID NO: 1479 - RNA, 31 nt, synthetic construct
  source 1..31: mol_type = other RNA; note = RTT*8 (CAG-to-CCG PAM silencing edit)
gtgaacaaattctgcaatcctcactcggggc

SEQ ID NO: 1480 - RNA, 31 nt, synthetic construct
  source 1..31: mol_type = other RNA; note = RTT*3,9
gtgaacaaattctgcaatcctcactctgggc

SEQ ID NO: 1481 - RNA, 32 nt, synthetic construct
  source 1..32: mol_type = other RNA; note = RTT*1,4 (CAG-to-CGC;CAGAGT-to- CGCTGT PAM silencing edit)
agtgaacaaattctgcaatcctcacagcgggc

SEQ ID NO: 1482 - RNA, 32 nt, synthetic construct
  source 1..32: mol_type = other RNA; note = RTT*2,5 (CAG-to-CAC;CAGAGT-to- CACTGT PAM silencing edit)
agtgaacaaattctgcaatcctcacagtgggc

SEQ ID NO: 1483 - RNA, 32 nt, synthetic construct
  source 1..32: mol_type = other RNA; note = RTT*6 (CAG-to-CTG PAM silencing edit)
agtgaacaaattctgcaatcctcactcagggc

SEQ ID NO: 1484 - RNA, 32 nt, synthetic construct
  source 1..32: mol_type = other RNA; note = RTT*7 (CAG-to-CGG PAM silencing edit)
agtgaacaaattctgcaatcctcactccgggc

SEQ ID NO: 1485 - RNA, 32 nt, synthetic construct
  source 1..32: mol_type = other RNA; note = RTT*8 (CAG-to-CCG PAM silencing edit)
agtgaacaaattctgcaatcctcactcggggc

SEQ ID NO: 1486 - RNA, 32 nt, synthetic construct
  source 1..32: mol_type = other RNA; note = RTT*3,9
agtgaacaaattctgcaatcctcactctgggc

SEQ ID NO: 1487 - RNA, 33 nt, synthetic construct
  source 1..33: mol_type = other RNA; note = RTT*1,4 (CAG-to-CGC;CAGAGT-to- CGCTGT PAM silencing edit)
cagtgaacaaattctgcaatcctcacagcgggc

SEQ ID NO: 1488 - RNA, 33 nt, synthetic construct
  source 1..33: mol_type = other RNA; note = RTT*2,5 (CAG-to-CAC;CAGAGT-to- CACTGT PAM silencing edit)
cagtgaacaaattctgcaatcctcacagtgggc

SEQ ID NO: 1489 - RNA, 33 nt, synthetic construct
  source 1..33: mol_type = other RNA; note = RTT*6 (CAG-to-CTG PAM silencing edit)
cagtgaacaaattctgcaatcctcactcagggc

SEQ ID NO: 1490 - RNA, 33 nt, synthetic construct
  source 1..33: mol_type = other RNA; note = RTT*7 (CAG-to-CGG PAM silencing edit)
cagtgaacaaattctgcaatcctcactccgggc

SEQ ID NO: 1491 - RNA, 33 nt, synthetic construct
  source 1..33: mol_type = other RNA; note = RTT*8 (CAG-to-CCG PAM silencing edit)
cagtgaacaaattctgcaatcctcactcggggc

SEQ ID NO: 1492 - RNA, 33 nt, synthetic construct
  source 1..33: mol_type = other RNA; note = RTT*3,9
cagtgaacaaattctgcaatcctcactctgggc

SEQ ID NO: 1493 - RNA, 34 nt, synthetic construct
  source 1..34: mol_type = other RNA; note = RTT*1,4 (CAG-to-CGC;CAGAGT-to- CGCTGT PAM silencing edit)
tcagtgaacaaattctgcaatcctcacagcgggc

SEQ ID NO: 1494 - RNA, 34 nt, synthetic construct
  source 1..34: mol_type = other RNA; note = RTT*2,5 (CAG-to-CAC;CAGAGT-to- CACTGT PAM silencing edit)
tcagtgaacaaattctgcaatcctcacagtgggc

SEQ ID NO: 1495 - RNA, 34 nt, synthetic construct
  source 1..34: mol_type = other RNA; note = RTT*6 (CAG-to-CTG PAM silencing edit)
tcagtgaacaaattctgcaatcctcactcagggc

SEQ ID NO: 1496 - RNA, 34 nt, synthetic construct
  source 1..34: mol_type = other RNA; note = RTT*7 (CAG-to-CGG PAM silencing edit)
tcagtgaacaaattctgcaatcctcactccgggc

SEQ ID NO: 1497 - RNA, 34 nt, synthetic construct
  source 1..34: mol_type = other RNA; note = RTT*8 (CAG-to-CCG PAM silencing edit)
tcagtgaacaaattctgcaatcctcactcggggc

SEQ ID NO: 1498 - RNA, 34 nt, synthetic construct
  source 1..34: mol_type = other RNA; note = RTT*3,9
tcagtgaacaaattctgcaatcctcactctgggc

SEQ ID NO: 1499 - RNA, 35 nt, synthetic construct
  source 1..35: mol_type = other RNA; note = RTT*1,4 (CAG-to-CGC;CAGAGT-to- CGCTGT PAM silencing edit)
ctcagtgaacaaattctgcaatcctcacagcgggc

SEQ ID NO: 1500 - RNA, 35 nt, synthetic construct
  source 1..35: mol_type = other RNA; note = RTT*2,5 (CAG-to-CAC;CAGAGT-to- CACTGT PAM silencing edit)
ctcagtgaacaaattctgcaatcctcacagtgggc

SEQ ID NO: 1501 - RNA, 35 nt, synthetic construct
  source 1..35: mol_type = other RNA; note = RTT*6 (CAG-to-CTG PAM silencing edit)
ctcagtgaacaaattctgcaatcctcactcagggc

SEQ ID NO: 1502 - RNA, 35 nt, synthetic construct
  source 1..35: mol_type = other RNA; note = RTT*7 (CAG-to-CGG PAM silencing edit)
ctcagtgaacaaattctgcaatcctcactccgggc

SEQ ID NO: 1503 - RNA, 35 nt, synthetic construct
  source 1..35: mol_type = other RNA; note = RTT*8 (CAG-to-CCG PAM silencing edit)
ctcagtgaacaaattctgcaatcctcactcggggc

SEQ ID NO: 1504 - RNA, 35 nt, synthetic construct
  source 1..35: mol_type = other RNA; note = RTT*3,9
ctcagtgaacaaattctgcaatcctcactctgggc

SEQ ID NO: 1505 - RNA, 36 nt, synthetic construct
  source 1..36: mol_type = other RNA; note = RTT*1,4 (CAG-to-CGC;CAGAGT-to- CGCTGT PAM silencing edit)
gctcagtgaacaaattctgcaatcctcacagcgggc

SEQ ID NO: 1506 - RNA, 36 nt, synthetic construct
  source 1..36: mol_type = other RNA; note = RTT*2,5 (CAG-to-CAC;CAGAGT-to- CACTGT PAM silencing edit)
gctcagtgaacaaattctgcaatcctcacagtgggc

SEQ ID NO: 1507 - RNA, 36 nt, synthetic construct
  source 1..36: mol_type = other RNA; note = RTT*6 (CAG-to-CTG PAM silencing edit)
gctcagtgaacaaattctgcaatcctcactcagggc

SEQ ID NO: 1508 - RNA, 36 nt, synthetic construct
  source 1..36: mol_type = other RNA; note = RTT*7 (CAG-to-CGG PAM silencing edit)
gctcagtgaacaaattctgcaatcctcactccgggc

SEQ ID NO: 1509 - RNA, 36 nt, synthetic construct
  source 1..36: mol_type = other RNA; note = RTT*8 (CAG-to-CCG PAM silencing edit)
gctcagtgaacaaattctgcaatcctcactcggggc

SEQ ID NO: 1510 - RNA, 36 nt, synthetic construct
  source 1..36: mol_type = other RNA; note = RTT*3,9
gctcagtgaacaaattctgcaatcctcactctgggc

SEQ ID NO: 1511 - RNA, 37 nt, synthetic construct
  source 1..37: mol_type = other RNA; note = RTT*1,4 (CAG-to-CGC;CAGAGT-to- CGCTGT PAM silencing edit)
ggctcagtgaacaaattctgcaatcctcacagcgggc

SEQ ID NO: 1512 - RNA, 37 nt, synthetic construct
  source 1..37: mol_type = other RNA; note = RTT*2,5 (CAG-to-CAC;CAGAGT-to- CACTGT PAM silencing edit)
ggctcagtgaacaaattctgcaatcctcacagtgggc

SEQ ID NO: 1513 - RNA, 37 nt, synthetic construct
  source 1..37: mol_type = other RNA; note = RTT*6 (CAG-to-CTG PAM silencing edit)
ggctcagtgaacaaattctgcaatcctcactcagggc

SEQ ID NO: 1514 - RNA, 37 nt, synthetic construct
  source 1..37: mol_type = other RNA; note = RTT*7 (CAG-to-CGG PAM silencing edit)
ggctcagtgaacaaattctgcaatcctcactccgggc

SEQ ID NO: 1515 - RNA, 37 nt, synthetic construct
  source 1..37: mol_type = other RNA; note = RTT*8 (CAG-to-CCG PAM silencing edit)
ggctcagtgaacaaattctgcaatcctcactcggggc

SEQ ID NO: 1516 - RNA, 37 nt, synthetic construct
  source 1..37: mol_type = other RNA; note = RTT*3,9
ggctcagtgaacaaattctgcaatcctcactctgggc

SEQ ID NO: 1517 - RNA, 38 nt, synthetic construct
  source 1..38: mol_type = other RNA; note = RTT*1,4 (CAG-to-CGC;CAGAGT-to- CGCTGT PAM silencing edit)
tggctcagtgaacaaattctgcaatcctcacagcgggc

SEQ ID NO: 1518 - RNA, 38 nt, synthetic construct
  source 1..38: mol_type = other RNA; note = RTT*2,5 (CAG-to-CAC;CAGAGT-to- CACTGT PAM silencing edit)
tggctcagtgaacaaattctgcaatcctcacagtgggc

SEQ ID NO: 1519 - RNA, 38 nt, synthetic construct
  source 1..38: mol_type = other RNA; note = RTT*6 (CAG-to-CTG PAM silencing edit)
tggctcagtgaacaaattctgcaatcctcactcagggc

SEQ ID NO: 1520 - RNA, 38 nt, synthetic construct
  source 1..38: mol_type = other RNA; note = RTT*7 (CAG-to-CGG PAM silencing edit)
tggctcagtgaacaaattctgcaatcctcactccgggc

SEQ ID NO: 1521 - RNA, 38 nt, synthetic construct
  source 1..38: mol_type = other RNA; note = RTT*8 (CAG-to-CCG PAM silencing edit)
tggctcagtgaacaaattctgcaatcctcactcggggc

SEQ ID NO: 1522 - RNA, 38 nt, synthetic construct
  source 1..38: mol_type = other RNA; note = RTT*3,9
tggctcagtgaacaaattctgcaatcctcactctgggc

SEQ ID NO: 1523 - RNA, 39 nt, synthetic construct
  source 1..39: mol_type = other RNA; note = RTT*1,4 (CAG-to-CGC;CAGAGT-to- CGCTGT PAM silencing edit)
atggctcagtgaacaaattctgcaatcctcacagcgggc

SEQ ID NO: 1524 - RNA, 39 nt, synthetic construct
  source 1..39: mol_type = other RNA; note = RTT*2,5 (CAG-to-CAC;CAGAGT-to- CACTGT PAM silencing edit)
atggctcagtgaacaaattctgcaatcctcacagtgggc

SEQ ID NO: 1525 - RNA, 39 nt, synthetic construct
  source 1..39: mol_type = other RNA; note = RTT*6 (CAG-to-CTG PAM silencing edit)
atggctcagtgaacaaattctgcaatcctcactcagggc

SEQ ID NO: 1526 - RNA, 39 nt, synthetic construct
  source 1..39: mol_type = other RNA; note = RTT*7 (CAG-to-CGG PAM silencing edit)
atggctcagtgaacaaattctgcaatcctcactccgggc

SEQ ID NO: 1527 - RNA, 39 nt, synthetic construct
  source 1..39: mol_type = other RNA; note = RTT*8 (CAG-to-CCG PAM silencing edit)
atggctcagtgaacaaattctgcaatcctcactcggggc

SEQ ID NO: 1528 - RNA, 39 nt, synthetic construct
  source 1..39: mol_type = other RNA; note = RTT*3,9
atggctcagtgaacaaattctgcaatcctcactctgggc

SEQ ID NO: 1529 - RNA, 40 nt, synthetic construct
  source 1..40: mol_type = other RNA; note = RTT*1,4 (CAG-to-CGC;CAGAGT-to- CGCTGT PAM silencing edit)
catggctcagtgaacaaattctgcaatcctcacagcgggc

SEQ ID NO: 1530 - RNA, 40 nt, synthetic construct
  source 1..40: mol_type = other RNA; note = RTT*2,5 (CAG-to-CAC;CAGAGT-to- CACTGT PAM silencing edit)
catggctcagtgaacaaattctgcaatcctcacagtgggc

SEQ ID NO: 1531 - RNA, 40 nt, synthetic construct
  source 1..40: mol_type = other RNA; note = RTT*6 (CAG-to-CTG PAM silencing edit)
catggctcagtgaacaaattctgcaatcctcactcagggc

SEQ ID NO: 1532 - RNA, 40 nt, synthetic construct
  source 1..40: mol_type = other RNA; note = RTT*7 (CAG-to-CGG PAM silencing edit)
catggctcagtgaacaaattctgcaatcctcactccgggc

SEQ ID NO: 1533 - RNA, 40 nt, synthetic construct
  source 1..40: mol_type = other RNA; note = RTT*8 (CAG-to-CCG PAM silencing edit)
catggctcagtgaacaaattctgcaatcctcactcggggc

SEQ ID NO: 1534 - RNA, 40 nt, synthetic construct
  source 1..40: mol_type = other RNA; note = RTT*3,9
catggctcagtgaacaaattctgcaatcctcactctgggc

SEQ ID NO: 1535 - RNA, 20 nt, synthetic construct
  source 1..20: mol_type = other RNA; note = PE3 ngRNA spacer (GTGAGT PAM)
caatcctcacagcgggcagt

SEQ ID NO: 1536 - RNA, 20 nt, synthetic construct
  source 1..20: mol_type = other RNA; note = PE3 ngRNA spacer (GTGAGT PAM)
caatcctcacagtgggcagt

SEQ ID NO: 1537 - RNA, 20 nt, synthetic construct
  source 1..20: mol_type = other RNA; note = PE3 ngRNA spacer (GTGAGT PAM)
caatcctcactctgggcagt

SEQ ID NO: 1538 - RNA, 20 nt, synthetic construct
  source 1..20: mol_type = other RNA; note = PE3b*6 ngRNA spacer (CAG PAM)
tctgcaatcctcactcaggg

SEQ ID NO: 1539 - RNA, 20 nt, synthetic construct
  source 1..20: mol_type = other RNA; note = PE3b*7 ngRNA spacer (CAG PAM)
tctgcaatcctcactccggg

SEQ ID NO: 1540 - RNA, 20 nt, synthetic construct
  source 1..20: mol_type = other RNA; note = PE3b*8 ngRNA spacer (CAG PAM)
tctgcaatcctcactcgggg

SEQ ID NO: 1541-1545 - skipped (5 entries)

SEQ ID NO: 1546 - RNA, 10 nt, synthetic construct
  source 1..10: mol_type = other RNA; note = PBS
acttcagtgt

SEQ ID NO: 1547 - RNA, 11 nt, synthetic construct
  source 1..11: mol_type = other RNA; note = PBS
acttcagtgtg

SEQ ID NO: 1548 - RNA, 12 nt, synthetic construct
  source 1..12: mol_type = other RNA; note = PBS
acttcagtgtga

SEQ ID NO: 1549 - RNA, 13 nt, synthetic construct
  source 1..13: mol_type = other RNA; note = PBS
acttcagtgtgac

SEQ ID NO: 1550 - RNA, 14 nt, synthetic construct
  source 1..14: mol_type = other RNA; note = PBS
acttcagtgtgaca

SEQ ID NO: 1551 - RNA, 15 nt, synthetic construct
  source 1..15: mol_type = other RNA; note = PBS
acttcagtgtgacac

SEQ ID NO: 1552 - RNA, 16 nt, synthetic construct
  source 1..16: mol_type = other RNA; note = PBS
acttcagtgtgacacc

SEQ ID NO: 1553 - RNA, 17 nt, synthetic construct
  source 1..17: mol_type = other RNA; note = PBS
acttcagtgtgacacct

SEQ ID NO: 1554 - RNA, 18 nt, synthetic construct
  source 1..18: mol_type = other RNA; note = PBS
acttcagtgtgacacctg

SEQ ID NO: 1555 - RNA, 19 nt, synthetic construct
  source 1..19: mol_type = other RNA; note = PBS
acttcagtgtgacacctgc

SEQ ID NO: 1556 - RNA, 17 nt, synthetic construct
  source 1..17: mol_type = other RNA; note = PEgRNA spacer (TTGG PAM)
tgtcacactgaagtcct

SEQ ID NO: 1557 - RNA, 18 nt, synthetic construct
  source 1..18: mol_type = other RNA; note = PEgRNA spacer (TTGG PAM)
gtgtcacactgaagtcct

SEQ ID NO: 1558 - RNA, 19 nt, synthetic construct
  source 1..19: mol_type = other RNA; note = PEgRNA spacer (TTGG PAM)
ggtgtcacactgaagtcct

SEQ ID NO: 1559 - RNA, 21 nt, synthetic construct
  source 1..21: mol_type = other RNA; note = PEgRNA spacer (TTGG PAM)
caggtgtcacactgaagtcct

SEQ ID NO: 1560 - RNA, 22 nt, synthetic construct
  source 1..22: mol_type = other RNA; note = PEgRNA spacer (TTGG PAM)
gcaggtgtcacactgaagtcct

SEQ ID NO: 1561 - RNA, 24 nt, synthetic construct
  source 1..24: mol_type = other RNA; note = RTT*2
tgagtgcaaaaaagaagccaaagg

SEQ ID NO: 1562 - RNA, 25 nt, synthetic construct
  source 1..25: mol_type = other RNA; note = RTT*2
gtgagtgcaaaaaagaagccaaagg

SEQ ID NO: 1563 - RNA, 26 nt, synthetic construct
  source 1..26: mol_type = other RNA; note = RTT*2
tgtgagtgcaaaaaagaagccaaagg

SEQ ID NO: 1564 - RNA, 27 nt, synthetic construct
  source 1..27: mol_type = other RNA; note = RTT*1 (TTGG-to-TTTG PAM silencing edit)
gtgtgagtgcaaaaaagaagcaaaagg

SEQ ID NO: 1565 - RNA, 27 nt, synthetic construct
  source 1..27: mol_type = other RNA; note = RTT*2
gtgtgagtgcaaaaaagaagccaaagg

SEQ ID NO: 1566 - RNA, 27 nt, synthetic construct
  source 1..27: mol_type = other RNA; note = RTT*3 (TTGG-to-TTCG PAM silencing edit)
gtgtgagtgcaaaaaagaagcgaaagg

SEQ ID NO: 1567 - RNA, 27 nt, synthetic construct
  source 1..27: mol_type = other RNA; note = RTT*4 (TTGG-to-TTAG PAM silencing edit)
gtgtgagtgcaaaaaagaagctaaagg

SEQ ID NO: 1568 - RNA, 28 nt, synthetic construct
  source 1..28: mol_type = other RNA; note = RTT*1 (TTGG-to-TTTG PAM silencing edit)
agtgtgagtgcaaaaaagaagcaaaagg

SEQ ID NO: 1569 - RNA, 28 nt, synthetic construct
  source 1..28: mol_type = other RNA; note = RTT*2
agtgtgagtgcaaaaaagaagccaaagg

SEQ ID NO: 1570 - RNA, 28 nt, synthetic construct
  source 1..28: mol_type = other RNA; note = RTT*3 (TTGG-to-TTCG PAM silencing edit)
agtgtgagtgcaaaaaagaagcgaaagg

SEQ ID NO: 1571 - RNA, 28 nt, synthetic construct
  source 1..28: mol_type = other RNA; note = RTT*4 (TTGG-to-TTAG PAM silencing edit)
agtgtgagtgcaaaaaagaagctaaagg

SEQ ID NO: 1572 - RNA, 29 nt, synthetic construct
  source 1..29: mol_type = other RNA; note = RTT*1 (TTGG-to-TTTG PAM silencing edit)
cagtgtgagtgcaaaaaagaagcaaaagg

SEQ ID NO: 1573 - RNA, 29 nt, synthetic construct
  source 1..29: mol_type = other RNA; note = RTT*2
cagtgtgagtgcaaaaaagaagccaaagg

SEQ ID NO: 1574 - RNA, 29 nt, synthetic construct
  source 1..29: mol_type = other RNA; note = RTT*3 (TTGG-to-TTCG PAM silencing edit)
cagtgtgagtgcaaaaaagaagcgaaagg

SEQ ID NO: 1575 - RNA, 29 nt, synthetic construct
  source 1..29: mol_type = other RNA; note = RTT*4 (TTGG-to-TTAG PAM silencing edit)
cagtgtgagtgcaaaaaagaagctaaagg

SEQ ID NO: 1576 - RNA, 30 nt, synthetic construct
  source 1..30: mol_type = other RNA; note = RTT*1 (TTGG-to-TTTG PAM silencing edit)
gcagtgtgagtgcaaaaaagaagcaaaagg

SEQ ID NO: 1577 - RNA, 30 nt, synthetic construct
  source 1..30: mol_type = other RNA; note = RTT*2
gcagtgtgagtgcaaaaaagaagccaaagg

SEQ ID NO: 1578 - RNA, 30 nt, synthetic construct
  source 1..30: mol_type = other RNA; note = RTT*3 (TTGG-to-TTCG PAM silencing edit)
gcagtgtgagtgcaaaaaagaagcgaaagg

SEQ ID NO: 1579 - RNA, 30 nt, synthetic construct
  source 1..30: mol_type = other RNA; note = RTT*4 (TTGG-to-TTAG PAM silencing edit)
gcagtgtgagtgcaaaaaagaagctaaagg

SEQ ID NO: 1580 - RNA, 31 nt, synthetic construct
  source 1..31: mol_type = other RNA; note = RTT*1 (TTGG-to-TTTG PAM silencing edit)
ggcagtgtgagtgcaaaaaagaagcaaaagg

SEQ ID NO: 1581 - RNA, 31 nt, synthetic construct
  source 1..31: mol_type = other RNA; note = RTT*2
ggcagtgtgagtgcaaaaaagaagccaaagg

SEQ ID NO: 1582 - RNA, 31 nt, synthetic construct
  source 1..31: mol_type = other RNA; note = RTT*3 (TTGG-to-TTCG PAM silencing edit)
ggcagtgtgagtgcaaaaaagaagcgaaagg

SEQ ID NO: 1583 - RNA, 31 nt, synthetic construct
  source 1..31: mol_type = other RNA; note = RTT*4 (TTGG-to-TTAG PAM silencing edit)
ggcagtgtgagtgcaaaaaagaagctaaagg

SEQ ID NO: 1584 - RNA, 32 nt, synthetic construct
  source 1..32: mol_type = other RNA; note = RTT*1 (TTGG-to-TTTG PAM silencing edit)
gggcagtgtgagtgcaaaaaagaagcaaaagg

SEQ ID NO: 1585 - RNA, 32 nt, synthetic construct
  source 1..32: mol_type = other RNA; note = RTT*2
gggcagtgtgagtgcaaaaaagaagccaaagg

SEQ ID NO: 1586 - RNA, 32 nt, synthetic construct
  source 1..32: mol_type = other RNA; note = RTT*3 (TTGG-to-TTCG PAM silencing edit)
gggcagtgtgagtgcaaaaaagaagcgaaagg

SEQ ID NO: 1587 - RNA, 32 nt, synthetic construct
  source 1..32: mol_type = other RNA; note = RTT*4 (TTGG-to-TTAG PAM silencing edit)
gggcagtgtgagtgcaaaaaagaagctaaagg

SEQ ID NO: 1588 - RNA, 33 nt, synthetic construct
  source 1..33: mol_type = other RNA; note = RTT*1 (TTGG-to-TTTG PAM silencing edit)
tgggcagtgtgagtgcaaaaaagaagcaaaagg

SEQ ID NO: 1589 - RNA, 33 nt, synthetic construct
  source 1..33: mol_type = other RNA; note = RTT*2
tgggcagtgtgagtgcaaaaaagaagccaaagg

SEQ ID NO: 1590 - RNA, 33 nt, synthetic construct
  source 1..33: mol_type = other RNA; note = RTT*3 (TTGG-to-TTCG PAM silencing edit)
tgggcagtgtgagtgcaaaaaagaagcgaaagg

SEQ ID NO: 1591 - RNA, 33 nt, synthetic construct
  source 1..33: mol_type = other RNA; note = RTT*4 (TTGG-to-TTAG PAM silencing edit)
tgggcagtgtgagtgcaaaaaagaagctaaagg

SEQ ID NO: 1592 - RNA, 34 nt, synthetic construct
  source 1..34: mol_type = other RNA; note = RTT*1 (TTGG-to-TTTG PAM silencing edit)
ctgggcagtgtgagtgcaaaaaagaagcaaaagg

SEQ ID NO: 1593 - RNA, 34 nt, synthetic construct
  source 1..34: mol_type = other RNA; note = RTT*2
ctgggcagtgtgagtgcaaaaaagaagccaaagg

SEQ ID NO: 1594 - RNA, 34 nt, synthetic construct
  source 1..34: mol_type = other RNA; note = RTT*3 (TTGG-to-TTCG PAM silencing edit)
ctgggcagtgtgagtgcaaaaaagaagcgaaagg

SEQ ID NO: 1595 - RNA, 34 nt, synthetic construct
  source 1..34: mol_type = other RNA; note = RTT*4 (TTGG-to-TTAG PAM silencing edit)
ctgggcagtgtgagtgcaaaaaagaagctaaagg

SEQ ID NO: 1596 - RNA, 35 nt, synthetic construct
  source 1..35: mol_type = other RNA; note = RTT*1 (TTGG-to-TTTG PAM silencing edit)
tctgggcagtgtgagtgcaaaaaagaagcaaaagg

SEQ ID NO: 1597 - RNA, 35 nt, synthetic construct
  source 1..35: mol_type = other RNA; note = RTT*2
tctgggcagtgtgagtgcaaaaaagaagccaaagg

SEQ ID NO: 1598 - RNA, 35 nt, synthetic construct
  source 1..35: mol_type = other RNA; note = RTT*3 (TTGG-to-TTCG PAM silencing edit)
tctgggcagtgtgagtgcaaaaaagaagcgaaagg

SEQ ID NO: 1599 - RNA, 35 nt, synthetic construct
  source 1..35: mol_type = other RNA; note = RTT*4 (TTGG-to-TTAG PAM silencing edit)
tctgggcagtgtgagtgcaaaaaagaagctaaagg

SEQ ID NO: 1600 - RNA, 36 nt, synthetic construct
  source 1..36: mol_type = other RNA; note = RTT*1 (TTGG-to-TTTG PAM silencing edit)
ctctgggcagtgtgagtgcaaaaaagaagcaaaagg

SEQ ID NO: 1601 - RNA, 36 nt, synthetic construct
  source 1..36: mol_type = other RNA; note = RTT*2
ctctgggcagtgtgagtgcaaaaaagaagccaaagg

SEQ ID NO: 1602 - RNA, 36 nt, synthetic construct
  source 1..36: mol_type = other RNA; note = RTT*3 (TTGG-to-TTCG PAM silencing edit)
ctctgggcagtgtgagtgcaaaaaagaagcgaaagg

SEQ ID NO: 1603 - RNA, 36 nt, synthetic construct
  source 1..36: mol_type = other RNA; note = RTT*4 (TTGG-to-TTAG PAM silencing edit)
ctctgggcagtgtgagtgcaaaaaagaagctaaagg

SEQ ID NO: 1604 - RNA, 37 nt, synthetic construct
  source 1..37: mol_type = other RNA; note = RTT*1 (TTGG-to-TTTG PAM silencing edit)
actctgggcagtgtgagtgcaaaaaagaagcaaaagg

SEQ ID NO: 1605 - RNA, 37 nt, synthetic construct
  source 1..37: mol_type = other RNA; note = RTT*2
actctgggcagtgtgagtgcaaaaaagaagccaaagg

SEQ ID NO: 1606 - RNA, 37 nt, synthetic construct
  source 1..37: mol_type = other RNA; note = RTT*3 (TTGG-to-TTCG PAM silencing edit)
actctgggcagtgtgagtgcaaaaaagaagcgaaagg

SEQ ID NO: 1607 - RNA, 37 nt, synthetic construct
  source 1..37: mol_type = other RNA; note = RTT*4 (TTGG-to-TTAG PAM silencing edit)
actctgggcagtgtgagtgcaaaaaagaagctaaagg

SEQ ID NO: 1608 - RNA, 38 nt, synthetic construct
  source 1..38: mol_type = other RNA; note = RTT*1 (TTGG-to-TTTG PAM silencing edit)
cactctgggcagtgtgagtgcaaaaaagaagcaaaagg

SEQ ID NO: 1609 - RNA, 38 nt, synthetic construct
  source 1..38: mol_type = other RNA; note = RTT*2
cactctgggcagtgtgagtgcaaaaaagaagccaaagg

SEQ ID NO: 1610 - RNA, 38 nt, synthetic construct
  source 1..38: mol_type = other RNA; note = RTT*3 (TTGG-to-TTCG PAM silencing edit)
cactctgggcagtgtgagtgcaaaaaagaagcgaaagg

SEQ ID NO: 1611 - RNA, 38 nt, synthetic construct
  source 1..38: mol_type = other RNA; note = RTT*4 (TTGG-to-TTAG PAM silencing edit)
cactctgggcagtgtgagtgcaaaaaagaagctaaagg

SEQ ID NO: 1612 - RNA, 39 nt, synthetic construct
  source 1..39: mol_type = other RNA; note = RTT*1 (TTGG-to-TTTG PAM silencing edit)
tcactctgggcagtgtgagtgcaaaaaagaagcaaaagg

SEQ ID NO: 1613 - RNA, 39 nt, synthetic construct
  source 1..39: mol_type = other RNA; note = RTT*2
tcactctgggcagtgtgagtgcaaaaaagaagccaaagg

SEQ ID NO: 1614 - RNA, 39 nt, synthetic construct
  source 1..39: mol_type = other RNA; note = RTT*3 (TTGG-to-TTCG PAM silencing edit)
tcactctgggcagtgtgagtgcaaaaaagaagcgaaagg

SEQ ID NO: 1615 - RNA, 39 nt, synthetic construct
  source 1..39: mol_type = other RNA; note = RTT*4 (TTGG-to-TTAG PAM silencing edit)
tcactctgggcagtgtgagtgcaaaaaagaagctaaagg

SEQ ID NO: 1616 - RNA, 40 nt, synthetic construct
  source 1..40: mol_type = other RNA; note = RTT*1 (TTGG-to-TTTG PAM silencing edit)
ctcactctgggcagtgtgagtgcaaaaaagaagcaaaagg

SEQ ID NO: 1617 - RNA, 40 nt, synthetic construct
  source 1..40: mol_type = other RNA; note = RTT*2
ctcactctgggcagtgtgagtgcaaaaaagaagccaaagg

SEQ ID NO: 1618 - RNA, 40 nt, synthetic construct
  source 1..40: mol_type = other RNA; note = RTT*3 (TTGG-to-TTCG PAM silencing edit)
ctcactctgggcagtgtgagtgcaaaaaagaagcgaaagg

SEQ ID NO: 1619 - RNA, 40 nt, synthetic construct
  source 1..40: mol_type = other RNA; note = RTT*4 (TTGG-to-TTAG PAM silencing edit)
ctcactctgggcagtgtgagtgcaaaaaagaagctaaagg

SEQ ID NO: 1620 - RNA, 20 nt, synthetic construct
  source 1..20: mol_type = other RNA; note = PE3b*1 ngRNA spacer (AAGG PAM)
tgagtgcaaaaaagaagcaa

SEQ ID NO: 1621 - RNA, 20 nt, synthetic construct
  source 1..20: mol_type = other RNA; note = PE3b*2 ngRNA spacer (AAGG PAM)
tgagtgcaaaaaagaagcca

SEQ ID NO: 1622 - RNA, 20 nt, synthetic construct
  source 1..20: mol_type = other RNA; note = PE3b*3 ngRNA spacer (AAGG PAM)
tgagtgcaaaaaagaagcga

SEQ ID NO: 1623 - RNA, 20 nt, synthetic construct
  source 1..20: mol_type = other RNA; note = PE3b*4 ngRNA spacer (AAGG PAM)
tgagtgcaaaaaagaagcta

SEQ ID NO: 1624-1628 - skipped (5 entries)

SEQ ID NO: 1629 - RNA, 10 nt, synthetic construct
  source 1..10: mol_type = other RNA; note = PBS
gaggattgca

SEQ ID NO: 1630 - RNA, 11 nt, synthetic construct
  source 1..11: mol_type = other RNA; note = PBS
gaggattgcag

SEQ ID NO: 1631 - RNA, 12 nt, synthetic construct
  source 1..12: mol_type = other RNA; note = PBS
gaggattgcaga

SEQ ID NO: 1632 - RNA, 14 nt, synthetic construct
  source 1..14: mol_type = other RNA; note = PBS
gaggattgcagaat

SEQ ID NO: 1633 - RNA, 15 nt, synthetic construct
  source 1..15: mol_type = other RNA; note = PBS
gaggattgcagaatt

SEQ ID NO: 1634 - RNA, 16 nt, synthetic construct
  source 1..16: mol_type = other RNA; note = PBS
gaggattgcagaattt

SEQ ID NO: 1635 - RNA, 17 nt, synthetic construct
  source 1..17: mol_type = other RNA; note = PBS
gaggattgcagaatttg

SEQ ID NO: 1636 - RNA, 18 nt, synthetic construct
  source 1..18: mol_type = other RNA; note = PBS
gaggattgcagaatttgt

SEQ ID NO: 1637 - RNA, 19 nt, synthetic construct
  source 1..19: mol_type = other RNA; note = PBS
gaggattgcagaatttgtt

SEQ ID NO: 1638 - RNA, 16 nt, synthetic construct
  source 1..16: mol_type = other RNA; note = RTT
tcacactgcccagagt

SEQ ID NO: 1639 - RNA, 23 nt, synthetic construct
  source 1..23: mol_type = other RNA; note = RTT
tttgcactcacactgcccagagt

SEQ ID NO: 1640 - RNA, 24 nt, synthetic construct
  source 1..24: mol_type = other RNA; note = RTT
ttttgcactcacactgcccagagt

SEQ ID NO: 1641 - RNA, 25 nt, synthetic construct
  source 1..25: mol_type = other RNA; note = RTT
tttttgcactcacactgcccagagt

SEQ ID NO: 1642 - RNA, 26 nt, synthetic construct
  source 1..26: mol_type = other RNA; note = RTT
ttttttgcactcacactgcccagagt

SEQ ID NO: 1643 - RNA, 27 nt, synthetic construct
  source 1..27: mol_type = other RNA; note = RTT
cttttttgcactcacactgcccagagt

SEQ ID NO: 1644 - RNA, 28 nt, synthetic construct
  source 1..28: mol_type = other RNA; note = RTT
tcttttttgcactcacactgcccagagt

SEQ ID NO: 1645 - RNA, 29 nt, synthetic construct
  source 1..29: mol_type = other RNA; note = RTT
ttcttttttgcactcacactgcccagagt

SEQ ID NO: 1646 - RNA, 30 nt, synthetic construct
  source 1..30: mol_type = other RNA; note = RTT
cttcttttttgcactcacactgcccagagt

SEQ ID NO: 1647 - RNA, 31 nt, synthetic construct
  source 1..31: mol_type = other RNA; note = RTT
gcttcttttttgcactcacactgcccagagt

SEQ ID NO: 1648 - RNA, 32 nt, synthetic construct
  source 1..32: mol_type = other RNA; note = RTT
ggcttcttttttgcactcacactgcccagagt

SEQ ID NO: 1649 - RNA, 33 nt, synthetic construct
  source 1..33: mol_type = other RNA; note = RTT
tggcttcttttttgcactcacactgcccagagt

SEQ ID NO: 1650 - RNA, 34 nt, synthetic construct
  source 1..34: mol_type = other RNA; note = RTT
ttggcttcttttttgcactcacactgcccagagt

SEQ ID NO: 1651 - RNA, 35 nt, synthetic construct
  source 1..35: mol_type = other RNA; note = RTT
tttggcttcttttttgcactcacactgcccagagt

SEQ ID NO: 1652 - RNA, 36 nt, synthetic construct
  source 1..36: mol_type = other RNA; note = RTT
ctttggcttcttttttgcactcacactgcccagagt

SEQ ID NO: 1653 - RNA, 37 nt, synthetic construct
  source 1..37: mol_type = other RNA; note = RTT
cctttggcttcttttttgcactcacactgcccagagt

SEQ ID NO: 1654 - RNA, 38 nt, synthetic construct
  source 1..38: mol_type = other RNA; note = RTT
tcctttggcttcttttttgcactcacactgcccagagt

SEQ ID NO: 1655 - RNA, 39 nt, synthetic construct
  source 1..39: mol_type = other RNA; note = RTT
gtcctttggcttcttttttgcactcacactgcccagagt

SEQ ID NO: 1656 - RNA, 40 nt, synthetic construct
  source 1..40: mol_type = other RNA; note = RTT
agtcctttggcttcttttttgcactcacactgcccagagt

SEQ ID NO: 1657 - RNA, 20 nt, synthetic construct
  source 1..20: mol_type = other RNA; note = PE3 ngRNA spacer (TTGG PAM)
cacagtcacaggccttacaa

SEQ ID NO: 1658-1662 - skipped (5 entries)

SEQ ID NO: 1663 - RNA, 10 nt, synthetic construct
  source 1..10: mol_type = other RNA; note = PBS
gtgtgacacc

SEQ ID NO: 1664 - RNA, 11 nt, synthetic construct
  source 1..11: mol_type = other RNA; note = PBS
gtgtgacacct

SEQ ID NO: 1665 - RNA, 12 nt, synthetic construct
  source 1..12: mol_type = other RNA; note = PBS
gtgtgacacctg

SEQ ID NO: 1666 - RNA, 13 nt, synthetic construct
  source 1..13: mol_type = other RNA; note = PBS
gtgtgacacctgc

SEQ ID NO: 1667 - RNA, 14 nt, synthetic construct
  source 1..14: mol_type = other RNA; note = PBS
gtgtgacacctgca

SEQ ID NO: 1668 - RNA, 15 nt, synthetic construct
  source 1..15: mol_type = other RNA; note = PBS
gtgtgacacctgcag

SEQ ID NO: 1669 - RNA, 16 nt, synthetic construct
  source 1..16: mol_type = other RNA; note = PBS
gtgtgacacctgcaga

SEQ ID NO: 1670 - RNA, 17 nt, synthetic construct
  source 1..17: mol_type = other RNA; note = PBS
gtgtgacacctgcagag

SEQ ID NO: 1671 - RNA, 18 nt, synthetic construct
  source 1..18: mol_type = other RNA; note = PBS
gtgtgacacctgcagaga

SEQ ID NO: 1672 - RNA, 19 nt, synthetic construct
  source 1..19: mol_type = other RNA; note = PBS
gtgtgacacctgcagagaa

SEQ ID NO: 1673 - RNA, 17 nt, synthetic construct
  source 1..17: mol_type = other RNA; note = PEgRNA spacer (AG PAM)
tgcaggtgtcacactga

SEQ ID NO: 1674 - RNA, 18 nt, synthetic construct
  source 1..18: mol_type = other RNA; note = PEgRNA spacer (AG PAM)
ctgcaggtgtcacactga

SEQ ID NO: 1675 - RNA, 19 nt, synthetic construct
  source 1..19: mol_type = other RNA; note = PEgRNA spacer (AG PAM)
tctgcaggtgtcacactga

SEQ ID NO: 1676 - RNA, 20 nt, synthetic construct
  source 1..20: mol_type = other RNA; note = PEgRNA spacer (AG PAM)
ctctgcaggtgtcacactga

SEQ ID NO: 1677 - RNA, 21 nt, synthetic construct
  source 1..21: mol_type = other RNA; note = PEgRNA spacer (AG PAM)
tctctgcaggtgtcacactga

SEQ ID NO: 1678 - RNA, 22 nt, synthetic construct
  source 1..22: mol_type = other RNA; note = PEgRNA spacer (AG PAM)
ttctctgcaggtgtcacactga

SEQ ID NO: 1679 - RNA, 30 nt, synthetic construct
  source 1..30: mol_type = other RNA; note = RTT
tgagtgcaaaaaagaagccaaaggacttca

SEQ ID NO: 1680 - RNA, 31 nt, synthetic construct
  source 1..31: mol_type = other RNA; note = RTT
gtgagtgcaaaaaagaagccaaaggacttca

SEQ ID NO: 1681 - RNA, 32 nt, synthetic construct
  source 1..32: mol_type = other RNA; note = RTT
tgtgagtgcaaaaaagaagccaaaggacttca

SEQ ID NO: 1682 - RNA, 33 nt, synthetic construct
  source 1..33: mol_type = other RNA; note = RTT
gtgtgagtgcaaaaaagaagccaaaggacttca

SEQ ID NO: 1683 - RNA, 33 nt, synthetic construct
  source 1..33: mol_type = other RNA; note = RTT (AG-to-AA PAM silencing edit)
gtgtgagtgcaaaaaagaagccaaaggattaca

SEQ ID NO: 1684 - RNA, 33 nt, synthetic construct
  source 1..33: mol_type = other RNA; note = RTT (AG-to-AA PAM silencing edit)
gtgtgagtgcaaaaaagaagccaaaggattgca

SEQ ID NO: 1685 - RNA, 34 nt, synthetic construct
  source 1..34: mol_type = other RNA; note = RTT
agtgtgagtgcaaaaaagaagccaaaggacttca

SEQ ID NO: 1686 - RNA, 34 nt, synthetic construct
  source 1..34: mol_type = other RNA; note = RTT (AG-to-AA PAM silencing edit)
agtgtgagtgcaaaaaagaagccaaaggattaca

SEQ ID NO: 1687 - RNA, 34 nt, synthetic construct
  source 1..34: mol_type = other RNA; note = RTT (AG-to-AA PAM silencing edit)
agtgtgagtgcaaaaaagaagccaaaggattgca

SEQ ID NO: 1688 - RNA, 35 nt, synthetic construct
  source 1..35: mol_type = other RNA; note = RTT
cagtgtgagtgcaaaaaagaagccaaaggacttca

SEQ ID NO: 1689 - RNA, 35 nt, synthetic construct
  source 1..35: mol_type = other RNA; note = RTT (AG-to-AA PAM silencing edit)
cagtgtgagtgcaaaaaagaagccaaaggattaca

SEQ ID NO: 1690 - RNA, 35 nt, synthetic construct
  source 1..35: mol_type = other RNA; note = RTT (AG-to-AA PAM silencing edit)
cagtgtgagtgcaaaaaagaagccaaaggattgca

SEQ ID NO: 1691 - RNA, 36 nt, synthetic construct
  source 1..36: mol_type = other RNA; note = RTT
gcagtgtgagtgcaaaaaagaagccaaaggacttca

SEQ ID NO: 1692 - RNA, 36 nt, synthetic construct
  source 1..36: mol_type = other RNA; note = RTT (AG-to-AA PAM silencing edit)
gcagtgtgagtgcaaaaaagaagccaaaggattaca

SEQ ID NO: 1693 - RNA, 36 nt, synthetic construct
  source 1..36: mol_type = other RNA; note = RTT (AG-to-AA PAM silencing edit)
gcagtgtgagtgcaaaaaagaagccaaaggattgca

SEQ ID NO: 1694 - RNA, 37 nt, synthetic construct
  source 1..37: mol_type = other RNA; note = RTT
ggcagtgtgagtgcaaaaaagaagccaaaggacttca

SEQ ID NO: 1695 - RNA, 37 nt, synthetic construct
  source 1..37: mol_type = other RNA; note = RTT (AG-to-AA PAM silencing edit)
ggcagtgtgagtgcaaaaaagaagccaaaggattaca

SEQ ID NO: 1696 - RNA, 37 nt, synthetic construct
  source 1..37: mol_type = other RNA; note = RTT (AG-to-AA PAM silencing edit)
ggcagtgtgagtgcaaaaaagaagccaaaggattgca

SEQ ID NO: 1697 - RNA, 38 nt, synthetic construct
  source 1..38: mol_type = other RNA; note = RTT
gggcagtgtgagtgcaaaaaagaagccaaaggacttca

SEQ ID NO: 1698 - RNA, 38 nt, synthetic construct
  source 1..38: mol_type = other RNA; note = RTT (AG-to-AA PAM silencing edit)
gggcagtgtgagtgcaaaaaagaagccaaaggattaca

SEQ ID NO: 1699 - RNA, 38 nt, synthetic construct
  source 1..38: mol_type = other RNA; note = RTT (AG-to-AA PAM silencing edit)
gggcagtgtgagtgcaaaaaagaagccaaaggattgca

SEQ ID NO: 1700 - RNA, 39 nt, synthetic construct
  source 1..39: mol_type = other RNA; note = RTT
tgggcagtgtgagtgcaaaaaagaagccaaaggacttca

SEQ ID NO: 1701 - RNA, 39 nt, synthetic construct
  source 1..39: mol_type = other RNA; note = RTT (AG-to-AA PAM silencing edit)
tgggcagtgtgagtgcaaaaaagaagccaaaggattaca

SEQ ID NO: 1702 - RNA, 39 nt, synthetic construct
  source 1..39: mol_type = other RNA; note = RTT (AG-to-AA PAM silencing edit)
tgggcagtgtgagtgcaaaaaagaagccaaaggattgca

SEQ ID NO: 1703 - RNA, 40 nt, synthetic construct
  source 1..40: mol_type = other RNA; note = RTT
ctgggcagtgtgagtgcaaaaaagaagccaaaggacttca

SEQ ID NO: 1704 - RNA, 40 nt, synthetic construct
  source 1..40: mol_type = other RNA; note = RTT (AG-to-AA PAM silencing edit)
ctgggcagtgtgagtgcaaaaaagaagccaaaggattaca

SEQ ID NO: 1705 - RNA, 40 nt, synthetic construct
  source 1..40: mol_type = other RNA; note = RTT (AG-to-AA PAM silencing edit)
ctgggcagtgtgagtgcaaaaaagaagccaaaggattgca

SEQ ID NO: 1706 - RNA, 20 nt, synthetic construct
  source 1..20: mol_type = other RNA; note = PE3 ngRNA spacer (AG PAM)
aaaagaagccaaaggacttc

SEQ ID NO: 1707 - RNA, 20 nt, synthetic construct
  source 1..20: mol_type = other RNA; note = PE3 ngRNA spacer (AG PAM)
aaaagaagccaaaggattac

SEQ ID NO: 1708 - RNA, 20 nt, synthetic construct
  source 1..20: mol_type = other RNA; note = PE3 ngRNA spacer (AG PAM)
aaaagaagccaaaggattgc

SEQ ID NO: 1709 - RNA, 20 nt, synthetic construct
  source 1..20: mol_type = other RNA; note = PE3 ngRNA spacer (TG PAM)
aagaagccaaaggacttcag

SEQ ID NO: 1710 - RNA, 20 nt, synthetic construct
  source 1..20: mol_type = other RNA; note = PE3 ngRNA spacer (TG PAM)
aagaagccaaaggattacag

SEQ ID NO: 1711 - RNA, 20 nt, synthetic construct
  source 1..20: mol_type = other RNA; note = PE3 ngRNA spacer (TG PAM)
aagaagccaaaggattgcag

SEQ ID NO: 1712 - RNA, 20 nt, synthetic construct
  source 1..20: mol_type = other RNA; note = PE3 ngRNA spacer (GG PAM)
agtgcaaaaaagaagccaaa

SEQ ID NO: 1713 - RNA, 20 nt, synthetic construct
  source 1..20: mol_type = other RNA; note = PE3b ngRNA spacer (AG PAM)
cagtgtgagtgcaaaaaaga

SEQ ID NO: 1714 - RNA, 20 nt, synthetic construct
  source 1..20: mol_type = other RNA; note = PE3 ngRNA spacer (TG PAM)
gaagccaaaggacttcagtg

SEQ ID NO: 1715 - RNA, 20 nt, synthetic construct
  source 1..20: mol_type = other RNA; note = PE3 ngRNA spacer (TG PAM)
gaagccaaaggattacagtg

SEQ ID NO: 1716 - RNA, 20 nt, synthetic construct
  source 1..20: mol_type = other RNA; note = PE3 ngRNA spacer (TG PAM)
gaagccaaaggattgcagtg

SEQ ID NO: 1717 - RNA, 20 nt, synthetic construct
  source 1..20: mol_type = other RNA; note = PE3b ngRNA spacer (AG PAM)
gagtgcaaaaaagaagccaa

SEQ ID NO: 1718-1722 - skipped (5 entries)

SEQ ID NO: 1723 - RNA, 10 nt, synthetic construct
  source 1..10: mol_type = other RNA; note = PBS
ggacttcagt

SEQ ID NO: 1724 - RNA, 11 nt, synthetic construct
  source 1..11: mol_type = other RNA; note = PBS
ggacttcagtg

SEQ ID NO: 1725 - RNA, 12 nt, synthetic construct
  source 1..12: mol_type = other RNA; note = PBS
ggacttcagtgt

SEQ ID NO: 1726 - RNA, 13 nt, synthetic construct
  source 1..13: mol_type = other RNA; note = PBS
ggacttcagtgtg

SEQ ID NO: 1727 - RNA, 14 nt, synthetic construct
  source 1..14: mol_type = other RNA; note = PBS
ggacttcagtgtga

SEQ ID NO: 1728 - RNA, 15 nt, synthetic construct
  source 1..15: mol_type = other RNA; note = PBS
ggacttcagtgtgac

SEQ ID NO: 1729 - RNA, 16 nt, synthetic construct
  source 1..16: mol_type = other RNA; note = PBS
ggacttcagtgtgaca

SEQ ID NO: 1730 - RNA, 17 nt, synthetic construct
  source 1..17: mol_type = other RNA; note = PBS
ggacttcagtgtgacac

SEQ ID NO: 1731 - RNA, 18 nt, synthetic construct
  source 1..18: mol_type = other RNA; note = PBS
ggacttcagtgtgacacc

SEQ ID NO: 1732 - RNA, 19 nt, synthetic construct
  source 1..19: mol_type = other RNA; note = PBS
ggacttcagtgtgacacct

SEQ ID NO: 1733 - RNA, 17 nt, synthetic construct
  source 1..17: mol_type = other RNA; note = PEgRNA spacer (GG PAM)
tcacactgaagtccttt

SEQ ID NO: 1734 - RNA, 18 nt, synthetic construct
  source 1..18: mol_type = other RNA; note = PEgRNA spacer (GG PAM)
gtcacactgaagtccttt

SEQ ID NO: 1735 - RNA, 19 nt, synthetic construct
  source 1..19: mol_type = other RNA; note = PEgRNA spacer (GG PAM)
tgtcacactgaagtccttt

SEQ ID NO: 1736 - RNA, 20 nt, synthetic construct
  source 1..20: mol_type = other RNA; note = PEgRNA spacer (GG PAM)
gtgtcacactgaagtccttt

SEQ ID NO: 1737 - RNA, 21 nt, synthetic construct
  source 1..21: mol_type = other RNA; note = PEgRNA spacer (GG PAM)
ggtgtcacactgaagtccttt

SEQ ID NO: 1738 - RNA, 22 nt, synthetic construct
  source 1..22: mol_type = other RNA; note = PEgRNA spacer (GG PAM)
aggtgtcacactgaagtccttt

SEQ ID NO: 1739 - RNA, 22 nt, synthetic construct
  source 1..22: mol_type = other RNA; note = RTT
tgagtgcaaaaaagaagccaaa

SEQ ID NO: 1740 - RNA, 23 nt, synthetic construct
  source 1..23: mol_type = other RNA; note = RTT
gtgagtgcaaaaaagaagccaaa

SEQ ID NO: 1741 - RNA, 24 nt, synthetic construct
  source 1..24: mol_type = other RNA; note = RTT
tgtgagtgcaaaaaagaagccaaa

SEQ ID NO: 1742 - RNA, 25 nt, synthetic construct
  source 1..25: mol_type = other RNA; note = RTT
gtgtgagtgcaaaaaagaagccaaa

SEQ ID NO: 1743 - RNA, 26 nt, synthetic construct
  source 1..26: mol_type = other RNA; note = RTT
agtgtgagtgcaaaaaagaagccaaa

SEQ ID NO: 1744 - RNA, 27 nt, synthetic construct
  source 1..27: mol_type = other RNA; note = RTT
cagtgtgagtgcaaaaaagaagccaaa

SEQ ID NO: 1745 - RNA, 28 nt, synthetic construct
  source 1..28: mol_type = other RNA; note = RTT
gcagtgtgagtgcaaaaaagaagccaaa

SEQ ID NO: 1746 - RNA, 29 nt, synthetic construct
  source 1..29: mol_type = other RNA; note = RTT
ggcagtgtgagtgcaaaaaagaagccaaa

SEQ ID NO: 1747 - RNA, 30 nt, synthetic construct
  source 1..30: mol_type = other RNA; note = RTT
gggcagtgtgagtgcaaaaaagaagccaaa

SEQ ID NO: 1748 - RNA, 31 nt, synthetic construct
  source 1..31: mol_type = other RNA; note = RTT
tgggcagtgtgagtgcaaaaaagaagccaaa

SEQ ID NO: 1749 - RNA, 32 nt, synthetic construct
  source 1..32: mol_type = other RNA; note = RTT
ctgggcagtgtgagtgcaaaaaagaagccaaa

SEQ ID NO: 1750 - RNA, 33 nt, synthetic construct
  source 1..33: mol_type = other RNA; note = RTT
tctgggcagtgtgagtgcaaaaaagaagccaaa

SEQ ID NO: 1751 - RNA, 34 nt, synthetic construct
  source 1..34: mol_type = other RNA; note = RTT
ctctgggcagtgtgagtgcaaaaaagaagccaaa

SEQ ID NO: 1752 - RNA, 35 nt, synthetic construct
  source 1..35: mol_type = other RNA; note = RTT
actctgggcagtgtgagtgcaaaaaagaagccaaa

SEQ ID NO: 1753 - RNA, 36 nt, synthetic construct
  source 1..36: mol_type = other RNA; note = RTT
cactctgggcagtgtgagtgcaaaaaagaagccaaa

SEQ ID NO: 1754 - RNA, 37 nt, synthetic construct
  source 1..37: mol_type = other RNA; note = RTT
tcactctgggcagtgtgagtgcaaaaaagaagccaaa

SEQ ID NO: 1755 - RNA, 38 nt, synthetic construct
  source 1..38: mol_type = other RNA; note = RTT
ctcactctgggcagtgtgagtgcaaaaaagaagccaaa

SEQ ID NO: 1756 - RNA, 39 nt, synthetic construct
  source 1..39: mol_type = other RNA; note = RTT
cctcactctgggcagtgtgagtgcaaaaaagaagccaaa

SEQ ID NO: 1757 - RNA, 40 nt, synthetic construct
  source 1..40: mol_type = other RNA; note = RTT
tcctcactctgggcagtgtgagtgcaaaaaagaagccaaa

SEQ ID NO: 1758-1762 - skipped (5 entries)

SEQ ID NO: 1763 - RNA, 10 nt, synthetic construct
  source 1..10: mol_type = other RNA; note = PBS
tgtgacacct

SEQ ID NO: 1764 - RNA, 11 nt, synthetic construct
  source 1..11: mol_type = other RNA; note = PBS
tgtgacacctg

SEQ ID NO: 1765 - RNA, 12 nt, synthetic construct
  source 1..12: mol_type = other RNA; note = PBS
tgtgacacctgc

SEQ ID NO: 1766 - RNA, 13 nt, synthetic construct
  source 1..13: mol_type = other RNA; note = PBS
tgtgacacctgca

SEQ ID NO: 1767 - RNA, 14 nt, synthetic construct
  source 1..14: mol_type = other RNA; note = PBS
tgtgacacctgcag

SEQ ID NO: 1768 - RNA, 15 nt, synthetic construct
  source 1..15: mol_type = other RNA; note = PBS
tgtgacacctgcaga

SEQ ID NO: 1769 - RNA, 16 nt, synthetic construct
  source 1..16: mol_type = other RNA; note = PBS
tgtgacacctgcagag

SEQ ID NO: 1770 - RNA, 17 nt, synthetic construct
  source 1..17: mol_type = other RNA; note = PBS
tgtgacacctgcagaga

SEQ ID NO: 1771 - RNA, 18 nt, synthetic construct
  source 1..18: mol_type = other RNA; note = PBS
tgtgacacctgcagagaa

SEQ ID NO: 1772 - RNA, 19 nt, synthetic construct
  source 1..19: mol_type = other RNA; note = PBS
tgtgacacctgcagagaaa

SEQ ID NO: 1773 - RNA, 17 nt, synthetic construct
  source 1..17: mol_type = other RNA; note = PEgRNA spacer (AAG PAM)
ctgcaggtgtcacactg

SEQ ID NO: 1774 - RNA, 18 nt, synthetic construct
  source 1..18: mol_type = other RNA; note = PEgRNA spacer (AAG PAM)
tctgcaggtgtcacactg

SEQ ID NO: 1775 - RNA, 19 nt, synthetic construct
  source 1..19: mol_type = other RNA; note = PEgRNA spacer (AAG PAM)
ctctgcaggtgtcacactg

SEQ ID NO: 1776 - RNA, 21 nt, synthetic construct
  source 1..21: mol_type = other RNA; note = PEgRNA spacer (AAG PAM)
ttctctgcaggtgtcacactg

SEQ ID NO: 1777 - RNA, 22 nt, synthetic construct
  source 1..22: mol_type = other RNA; note = PEgRNA spacer (AAG PAM)
tttctctgcaggtgtcacactg

SEQ ID NO: 1778 - RNA, 31 nt, synthetic construct
  source 1..31: mol_type = other RNA; note = RTT
tgagtgcaaaaaagaagccaaaggacttcag

SEQ ID NO: 1779 - RNA, 31 nt, synthetic construct
  source 1..31: mol_type = other RNA; note = RTT (AAG-to-CAA PAM silencing edit)
tgagtgcaaaaaagaagccaaaggattgcag

SEQ ID NO: 1780 - RNA, 32 nt, synthetic construct
  source 1..32: mol_type = other RNA; note = RTT
gtgagtgcaaaaaagaagccaaaggacttcag

SEQ ID NO: 1781 - RNA, 32 nt, synthetic construct
  source 1..32: mol_type = other RNA; note = RTT (AAG-to-CAA PAM silencing edit)
gtgagtgcaaaaaagaagccaaaggattgcag

SEQ ID NO: 1782 - RNA, 33 nt, synthetic construct
  source 1..33: mol_type = other RNA; note = RTT
tgtgagtgcaaaaaagaagccaaaggacttcag

SEQ ID NO: 1783 - RNA, 33 nt, synthetic construct
  source 1..33: mol_type = other RNA; note = RTT (AAG-to-CAA PAM silencing edit)
tgtgagtgcaaaaaagaagccaaaggattgcag

SEQ ID NO: 1784 - RNA, 34 nt, synthetic construct
  source 1..34: mol_type = other RNA; note = RTT
gtgtgagtgcaaaaaagaagccaaaggacttcag

SEQ ID NO: 1785 - RNA, 34 nt, synthetic construct
  source 1..34: mol_type = other RNA; note = RTT (AAG-to-TAA PAM silencing edit)
gtgtgagtgcaaaaaagaagccaaaggattacag

SEQ ID NO: 1786 - RNA, 34 nt, synthetic construct
  source 1..34: mol_type = other RNA; note = RTT (AAG-to-CAA PAM silencing edit)
gtgtgagtgcaaaaaagaagccaaaggattgcag

SEQ ID NO: 1787 - RNA, 35 nt, synthetic construct
  source 1..35: mol_type = other RNA; note = RTT
agtgtgagtgcaaaaaagaagccaaaggacttcag

SEQ ID NO: 1788 - RNA, 35 nt, synthetic construct
  source 1..35: mol_type = other RNA; note = RTT (AAG-to-TAA PAM silencing edit)
agtgtgagtgcaaaaaagaagccaaaggattacag

SEQ ID NO: 1789 - RNA, 35 nt, synthetic construct
  source 1..35: mol_type = other RNA; note = RTT (AAG-to-CAA PAM silencing edit)
agtgtgagtgcaaaaaagaagccaaaggattgcag

SEQ ID NO: 1790 - RNA, 36 nt, synthetic construct
  source 1..36: mol_type = other RNA; note = RTT
cagtgtgagtgcaaaaaagaagccaaaggacttcag

SEQ ID NO: 1791 - RNA, 36 nt, synthetic construct
  source 1..36: mol_type = other RNA; note = RTT (AAG-to-TAA PAM silencing edit)
cagtgtgagtgcaaaaaagaagccaaaggattacag

SEQ ID NO: 1792 - RNA, 36 nt, synthetic construct
  source 1..36: mol_type = other RNA; note = RTT (AAG-to-CAA PAM silencing edit)
cagtgtgagtgcaaaaaagaagccaaaggattgcag

SEQ ID NO: 1793 - RNA, 37 nt, synthetic construct
  source 1..37: mol_type = other RNA; note = RTT
gcagtgtgagtgcaaaaaagaagccaaaggacttcag

SEQ ID NO: 1794 - RNA, 37 nt, synthetic construct
  source 1..37: mol_type = other RNA; note = RTT (AAG-to-TAA PAM silencing edit)
gcagtgtgagtgcaaaaaagaagccaaaggattacag

SEQ ID NO: 1795 - RNA, 37 nt, synthetic construct
  source 1..37: mol_type = other RNA; note = RTT (AAG-to-CAA PAM silencing edit)
gcagtgtgagtgcaaaaaagaagccaaaggattgcag

SEQ ID NO: 1796 - RNA, 38 nt, synthetic construct
  source 1..38: mol_type = other RNA; note = RTT
ggcagtgtgagtgcaaaaaagaagccaaaggacttcag

SEQ ID NO: 1797 - RNA, 38 nt, synthetic construct
  source 1..38: mol_type = other RNA; note = RTT (AAG-to-TAA PAM silencing edit)
ggcagtgtgagtgcaaaaaagaagccaaaggattacag

SEQ ID NO: 1798 - RNA, 38 nt, synthetic construct
  source 1..38: mol_type = other RNA; note = RTT (AAG-to-CAA PAM silencing edit)
ggcagtgtgagtgcaaaaaagaagccaaaggattgcag

SEQ ID NO: 1799 - RNA, 39 nt, synthetic construct
  source 1..39: mol_type = other RNA; note = RTT
gggcagtgtgagtgcaaaaaagaagccaaaggacttcag

SEQ ID NO: 1800 - RNA, 39 nt, synthetic construct
  source 1..39: mol_type = other RNA; note = RTT (AAG-to-TAA PAM silencing edit)
gggcagtgtgagtgcaaaaaagaagccaaaggattacag

SEQ ID NO: 1801 - RNA, 39 nt, synthetic construct
  source 1..39: mol_type = other RNA; note = RTT (AAG-to-CAA PAM silencing edit)
gggcagtgtgagtgcaaaaaagaagccaaaggattgcag

SEQ ID NO: 1802 - RNA, 40 nt, synthetic construct
  source 1..40: mol_type = other RNA; note = RTT
tgggcagtgtgagtgcaaaaaagaagccaaaggacttcag

SEQ ID NO: 1803 - RNA, 40 nt, synthetic construct
  source 1..40: mol_type = other RNA; note = RTT (AAG-to-TAA PAM silencing edit)
tgggcagtgtgagtgcaaaaaagaagccaaaggattacag

SEQ ID NO: 1804 - RNA, 40 nt, synthetic construct
  source 1..40: mol_type = other RNA; note = RTT (AAG-to-CAA PAM silencing edit)
tgggcagtgtgagtgcaaaaaagaagccaaaggattgcag

SEQ ID NO: 1805 - RNA, 20 nt, synthetic construct
  source 1..20: mol_type = other RNA; note = PE3 ngRNA spacer (CAG PAM)
aaaaagaagccaaaggactt

SEQ ID NO: 1806 - RNA, 20 nt, synthetic construct
  source 1..20: mol_type = other RNA; note = PE3 ngRNA spacer (CAG PAM)
aaaaagaagccaaaggatta

SEQ ID NO: 1807 - RNA, 20 nt, synthetic construct
  source 1..20: mol_type = other RNA; note = PE3 ngRNA spacer (CAG PAM)
aaaaagaagccaaaggattg

SEQ ID NO: 1808 - RNA, 20 nt, synthetic construct
  source 1..20: mol_type = other RNA; note = PE3b ngRNA spacer (AAG PAM)
gcagtgtgagtgcaaaaaag

SEQ ID NO: 1809-1813 - skipped (5 entries)

SEQ ID NO: 1814 - RNA, 10 nt, synthetic construct
  source 1..10: mol_type = other RNA; note = PBS
agagtgagga

SEQ ID NO: 1815 - RNA, 11 nt, synthetic construct
  source 1..11: mol_type = other RNA; note = PBS
agagtgaggat

SEQ ID NO: 1816 - RNA, 12 nt, synthetic construct
  source 1..12: mol_type = other RNA; note = PBS
agagtgaggatt

SEQ ID NO: 1817 - RNA, 13 nt, synthetic construct
  source 1..13: mol_type = other RNA; note = PBS
agagtgaggattg

SEQ ID NO: 1818 - RNA, 14 nt, synthetic construct
  source 1..14: mol_type = other RNA; note = PBS
agagtgaggattgc

SEQ ID NO: 1819 - RNA, 15 nt, synthetic construct
  source 1..15: mol_type = other RNA; note = PBS
agagtgaggattgca

SEQ ID NO: 1820 - RNA, 16 nt, synthetic construct
  source 1..16: mol_type = other RNA; note = PBS
agagtgaggattgcag

SEQ ID NO: 1821 - RNA, 17 nt, synthetic construct
  source 1..17: mol_type = other RNA; note = PBS
agagtgaggattgcaga

SEQ ID NO: 1822 - RNA, 19 nt, synthetic construct
  source 1..19: mol_type = other RNA; note = PBS
agagtgaggattgcagaat

SEQ ID NO: 1823 - RNA, 17 nt, synthetic construct
  source 1..17: mol_type = other RNA; note = PEgRNA spacer (CAG PAM)
gcaatcctcactctggg

SEQ ID NO: 1824 - RNA, 11 nt, synthetic construct
  source 1..11: mol_type = other RNA; note = RTT*1,3
tcacactgccc

SEQ ID NO: 1825 - RNA, 11 nt, synthetic construct
  source 1..11: mol_type = other RNA; note = RTT*2,4 (CAG-to-CAA PAM silencing edit)
tcacattgccc

SEQ ID NO: 1826 - RNA, 12 nt, synthetic construct
  source 1..12: mol_type = other RNA; note = RTT*1,3
ctcacactgccc

SEQ ID NO: 1827 - RNA, 12 nt, synthetic construct
  source 1..12: mol_type = other RNA; note = RTT*2,4 (CAG-to-CAA PAM silencing edit)
ctcacattgccc

SEQ ID NO: 1828 - RNA, 13 nt, synthetic construct
  source 1..13: mol_type = other RNA; note = RTT*1,3
actcacactgccc

SEQ ID NO: 1829 - RNA, 13 nt, synthetic construct
  source 1..13: mol_type = other RNA; note = RTT*2,4 (CAG-to-CAA PAM silencing edit)
actcacattgccc

SEQ ID NO: 1830 - RNA, 14 nt, synthetic construct
  source 1..14: mol_type = other RNA; note = RTT*1,3
cactcacactgccc

SEQ ID NO: 1831 - RNA, 14 nt, synthetic construct
  source 1..14: mol_type = other RNA; note = RTT*2,4 (CAG-to-CAA PAM silencing edit)
cactcacattgccc

SEQ ID NO: 1832 - RNA, 15 nt, synthetic construct
  source 1..15: mol_type = other RNA; note = RTT*1,3
gcactcacactgccc

SEQ ID NO: 1833 - RNA, 15 nt, synthetic construct
  source 1..15: mol_type = other RNA; note = RTT*2,4 (CAG-to-CAA PAM silencing edit)
gcactcacattgccc

SEQ ID NO: 1834 - RNA, 16 nt, synthetic construct
  source 1..16: mol_type = other RNA; note = RTT*1,3
tgcactcacactgccc

SEQ ID NO: 1835 - RNA, 16 nt, synthetic construct
  source 1..16: mol_type = other RNA; note = RTT*2,4 (CAG-to-CAA PAM silencing edit)
tgcactcacattgccc

SEQ ID NO: 1836 - RNA, 17 nt, synthetic construct
  source 1..17: mol_type = other RNA; note = RTT*2,4 (CAG-to-CAA PAM silencing edit)
ttgcactcacattgccc

SEQ ID NO: 1837 - RNA, 18 nt, synthetic construct
  source 1..18: mol_type = other RNA; note = RTT*2,4 (CAG-to-CAA PAM silencing edit)
tttgcactcacattgccc

SEQ ID NO: 1838 - RNA, 19 nt, synthetic construct
  source 1..19: mol_type = other RNA; note = RTT*2,4 (CAG-to-CAA PAM silencing edit)
ttttgcactcacattgccc

SEQ ID NO: 1839 - RNA, 20 nt, synthetic construct
  source 1..20: mol_type = other RNA; note = RTT*2,4 (CAG-to-CAA PAM silencing edit)
tttttgcactcacattgccc

SEQ ID NO: 1840 - RNA, 21 nt, synthetic construct
  source 1..21: mol_type = other RNA; note = RTT*2,4 (CAG-to-CAA PAM silencing edit)
ttttttgcactcacattgccc

SEQ ID NO: 1841 - RNA, 22 nt, synthetic construct
  source 1..22: mol_type = other RNA; note = RTT*2,4 (CAG-to-CAA PAM silencing edit)
cttttttgcactcacattgccc

SEQ ID NO: 1842 - RNA, 23 nt, synthetic construct
  source 1..23: mol_type = other RNA; note = RTT*1,3
tcttttttgcactcacactgccc

SEQ ID NO: 1843 - RNA, 23 nt, synthetic construct
  source 1..23: mol_type = other RNA; note = RTT*2,4 (CAG-to-CAA PAM silencing edit)
tcttttttgcactcacattgccc

SEQ ID NO: 1844 - RNA, 24 nt, synthetic construct
  source 1..24: mol_type = other RNA; note = RTT*1,3
ttcttttttgcactcacactgccc

SEQ ID NO: 1845 - RNA, 24 nt, synthetic construct
  source 1..24: mol_type = other RNA; note = RTT*2,4 (CAG-to-CAA PAM silencing edit)
ttcttttttgcactcacattgccc

SEQ ID NO: 1846 - RNA, 25 nt, synthetic construct
  source 1..25: mol_type = other RNA; note = RTT*1,3
cttcttttttgcactcacactgccc

SEQ ID NO: 1847 - RNA, 25 nt, synthetic construct
  source 1..25: mol_type = other RNA; note = RTT*2,4 (CAG-to-CAA PAM silencing edit)
cttcttttttgcactcacattgccc

SEQ ID NO: 1848 - RNA, 26 nt, synthetic construct
  source 1..26: mol_type = other RNA; note = RTT*1,3
gcttcttttttgcactcacactgccc

SEQ ID NO: 1849 - RNA, 26 nt, synthetic construct
  source 1..26: mol_type = other RNA; note = RTT*2,4 (CAG-to-CAA PAM silencing edit)
gcttcttttttgcactcacattgccc

SEQ ID NO: 1850 - RNA, 27 nt, synthetic construct
  source 1..27: mol_type = other RNA; note = RTT*1,3
ggcttcttttttgcactcacactgccc

SEQ ID NO: 1851 - RNA, 27 nt, synthetic construct
  source 1..27: mol_type = other RNA; note = RTT*2,4 (CAG-to-CAA PAM silencing edit)
ggcttcttttttgcactcacattgccc

SEQ ID NO: 1852 - RNA, 28 nt, synthetic construct
  source 1..28: mol_type = other RNA; note = RTT*1,3
tggcttcttttttgcactcacactgccc

SEQ ID NO: 1853 - RNA, 28 nt, synthetic construct
  source 1..28: mol_type = other RNA; note = RTT*2,4 (CAG-to-CAA PAM silencing edit)
tggcttcttttttgcactcacattgccc

SEQ ID NO: 1854 - RNA, 29 nt, synthetic construct
  source 1..29: mol_type = other RNA; note = RTT*1,3
ttggcttcttttttgcactcacactgccc

SEQ ID NO: 1855 - RNA, 29 nt, synthetic construct
  source 1..29: mol_type = other RNA; note = RTT*2,4 (CAG-to-CAA PAM silencing edit)
ttggcttcttttttgcactcacattgccc

SEQ ID NO: 1856 - RNA, 30 nt, synthetic construct
  source 1..30: mol_type = other RNA; note = RTT*1,3
tttggcttcttttttgcactcacactgccc

SEQ ID NO: 1857 - RNA, 30 nt, synthetic construct
  source 1..30: mol_type = other RNA; note = RTT*2,4 (CAG-to-CAA PAM silencing edit)
tttggcttcttttttgcactcacattgccc

SEQ ID NO: 1858 - RNA, 31 nt, synthetic construct
  source 1..31: mol_type = other RNA; note = RTT*1,3
ctttggcttcttttttgcactcacactgccc

SEQ ID NO: 1859 - RNA, 31 nt, synthetic construct
  source 1..31: mol_type = other RNA; note = RTT*2,4 (CAG-to-CAA PAM silencing edit)
ctttggcttcttttttgcactcacattgccc

SEQ ID NO: 1860 - RNA, 32 nt, synthetic construct
  source 1..32: mol_type = other RNA; note = RTT*1,3
cctttggcttcttttttgcactcacactgccc

SEQ ID NO: 1861 - RNA, 32 nt, synthetic construct
  source 1..32: mol_type = other RNA; note = RTT*2,4 (CAG-to-CAA PAM silencing edit)
cctttggcttcttttttgcactcacattgccc

SEQ ID NO: 1862 - RNA, 33 nt, synthetic construct
  source 1..33: mol_type = other RNA; note = RTT*1,3
tcctttggcttcttttttgcactcacactgccc

SEQ ID NO: 1863 - RNA, 33 nt, synthetic construct
  source 1..33: mol_type = other RNA; note = RTT*2,4 (CAG-to-CAA PAM silencing edit)
tcctttggcttcttttttgcactcacattgccc

SEQ ID NO: 1864 - RNA, 34 nt, synthetic construct
  source 1..34: mol_type = other RNA; note = RTT*1,3
gtcctttggcttcttttttgcactcacactgccc

SEQ ID NO: 1865 - RNA, 34 nt, synthetic construct
  source 1..34: mol_type = other RNA; note = RTT*2,4 (CAG-to-CAA PAM silencing edit)
gtcctttggcttcttttttgcactcacattgccc

SEQ ID NO: 1866 - RNA, 35 nt, synthetic construct
  source 1..35: mol_type = other RNA; note = RTT*1,3
agtcctttggcttcttttttgcactcacactgccc

SEQ ID NO: 1867 - RNA, 35 nt, synthetic construct
  source 1..35: mol_type = other RNA; note = RTT*2,4 (CAG-to-CAA PAM silencing edit)
agtcctttggcttcttttttgcactcacattgccc

SEQ ID NO: 1868 - RNA, 36 nt, synthetic construct
  source 1..36: mol_type = other RNA; note = RTT*1,3
aagtcctttggcttcttttttgcactcacactgccc

SEQ ID NO: 1869 - RNA, 36 nt, synthetic construct
  source 1..36: mol_type = other RNA; note = RTT*2,4 (CAG-to-CAA PAM silencing edit)
aagtcctttggcttcttttttgcactcacattgccc

SEQ ID NO: 1870 - RNA, 37 nt, synthetic construct
  source 1..37: mol_type = other RNA; note = RTT*1,3
gaagtcctttggcttcttttttgcactcacactgccc

SEQ ID NO: 1871 - RNA, 37 nt, synthetic construct
  source 1..37: mol_type = other RNA; note = RTT*2,4 (CAG-to-CAA PAM silencing edit)
gaagtcctttggcttcttttttgcactcacattgccc

SEQ ID NO: 1872 - RNA, 38 nt, synthetic construct
  source 1..38: mol_type = other RNA; note = RTT*1,3
tgaagtcctttggcttcttttttgcactcacactgccc

SEQ ID NO: 1873 - RNA, 38 nt, synthetic construct
  source 1..38: mol_type = other RNA; note = RTT*2,4 (CAG-to-CAA PAM silencing edit)
tgaagtcctttggcttcttttttgcactcacattgccc

SEQ ID NO: 1874 - RNA, 39 nt, synthetic construct
  source 1..39: mol_type = other RNA; note = RTT*1,3
ctgaagtcctttggcttcttttttgcactcacactgccc

SEQ ID NO: 1875 - RNA, 39 nt, synthetic construct
  source 1..39: mol_type = other RNA; note = RTT*2,4 (CAG-to-CAA PAM silencing edit)
ctgaagtcctttggcttcttttttgcactcacattgccc

SEQ ID NO: 1876 - RNA, 40 nt, synthetic construct
  source 1..40: mol_type = other RNA; note = RTT*1,3
actgaagtcctttggcttcttttttgcactcacactgccc

SEQ ID NO: 1877 - RNA, 40 nt, synthetic construct
  source 1..40: mol_type = other RNA; note = RTT*2,4 (CAG-to-CAA PAM silencing edit)
actgaagtcctttggcttcttttttgcactcacattgccc

SEQ ID NO: 1878 - RNA, 20 nt, synthetic construct
  source 1..20: mol_type = other RNA; note = PE3b*2 ngRNA spacer (GAG PAM)
ttttgcactcacattgccca

SEQ ID NO: 1879 - RNA, 20 nt, synthetic construct
  source 1..20: mol_type = other RNA; note = PE3b*4 ngRNA spacer (CAG PAM)
ttttttgcactcacattgcc

SEQ ID NO: 1880-1884 - skipped (5 entries)

SEQ ID NO: 1885 - RNA, 10 nt, synthetic construct
  source 1..10: mol_type = other RNA; note = PBS
ctctgggcag

SEQ ID NO: 1886 - RNA, 11 nt, synthetic construct
  source 1..11: mol_type = other RNA; note = PBS
ctctgggcagt

SEQ ID NO: 1887 - RNA, 12 nt, synthetic construct
  source 1..12: mol_type = other RNA; note = PBS
ctctgggcagtg

SEQ ID NO: 1888 - RNA, 13 nt, synthetic construct
  source 1..13: mol_type = other RNA; note = PBS
ctctgggcagtgt

SEQ ID NO: 1889 - RNA, 14 nt, synthetic construct
  source 1..14: mol_type = other RNA; note = PBS
ctctgggcagtgtg

SEQ ID NO: 1890 - RNA, 15 nt, synthetic construct
  source 1..15: mol_type = other RNA; note = PBS
ctctgggcagtgtga

SEQ ID NO: 1891 - RNA, 16 nt, synthetic construct
  source 1..16: mol_type = other RNA; note = PBS
ctctgggcagtgtgag

SEQ ID NO: 1892 - RNA, 17 nt, synthetic construct
  source 1..17: mol_type = other RNA; note = PBS
ctctgggcagtgtgagt

SEQ ID NO: 1893 - RNA, 18 nt, synthetic construct
  source 1..18: mol_type = other RNA; note = PBS
ctctgggcagtgtgagtg

SEQ ID NO: 1894 - RNA, 19 nt, synthetic construct
  source 1..19: mol_type = other RNA; note = PBS
ctctgggcagtgtgagtgc

SEQ ID NO: 1895 - RNA, 17 nt, synthetic construct
  source 1..17: mol_type = other RNA; note = PEgRNA spacer (GG;GGA PAM)
cacactgcccagagtga

SEQ ID NO: 1896 - RNA, 18 nt, synthetic construct
  source 1..18: mol_type = other RNA; note = PEgRNA spacer (GG;GGA PAM)
tcacactgcccagagtga

SEQ ID NO: 1897 - RNA, 19 nt, synthetic construct
  source 1..19: mol_type = other RNA; note = PEgRNA spacer (GG;GGA PAM)
ctcacactgcccagagtga

SEQ ID NO: 1898 - RNA, 20 nt, synthetic construct
  source 1..20: mol_type = other RNA; note = PE3b*1 ngRNA spacer (GG PAM)
actcacactgcccagagtga

SEQ ID NO: 1899 - RNA, 21 nt, synthetic construct
  source 1..21: mol_type = other RNA; note = PEgRNA spacer (GG;GGA PAM)
cactcacactgcccagagtga

SEQ ID NO: 1900 - RNA, 22 nt, synthetic construct
  source 1..22: mol_type = other RNA; note = PEgRNA spacer (GG;GGA PAM)
gcactcacactgcccagagtga

SEQ ID NO: 1901 - RNA, 11 nt, synthetic construct
  source 1..11: mol_type = other RNA; note = RTT*1
tgcaatcctca

SEQ ID NO: 1902 - RNA, 12 nt, synthetic construct
  source 1..12: mol_type = other RNA; note = RTT*1
ctgcaatcctca

SEQ ID NO: 1903 - RNA, 13 nt, synthetic construct
  source 1..13: mol_type = other RNA; note = RTT*1
tctgcaatcctca

SEQ ID NO: 1904 - RNA, 14 nt, synthetic construct
  source 1..14: mol_type = other RNA; note = RTT (GGA-to-GGG PAM silencing edit)
ttctgcaaccctca

SEQ ID NO: 1905 - RNA, 14 nt, synthetic construct
  source 1..14: mol_type = other RNA; note = RTT*1
ttctgcaatcctca

SEQ ID NO: 1906 - RNA, 15 nt, synthetic construct
  source 1..15: mol_type = other RNA; note = RTT (GGA-to-GGG PAM silencing edit)
attctgcaaccctca

SEQ ID NO: 1907 - RNA, 15 nt, synthetic construct
  source 1..15: mol_type = other RNA; note = RTT*1
attctgcaatcctca

SEQ ID NO: 1908 - RNA, 16 nt, synthetic construct
  source 1..16: mol_type = other RNA; note = RTT (GGA-to-GGG PAM silencing edit)
aattctgcaaccctca

SEQ ID NO: 1909 - RNA, 16 nt, synthetic construct
  source 1..16: mol_type = other RNA; note = RTT*1
aattctgcaatcctca

SEQ ID NO: 1910 - RNA, 17 nt, synthetic construct
  source 1..17: mol_type = other RNA; note = RTT (GGA-to-GGG PAM silencing edit)
aaattctgcaaccctca

SEQ ID NO: 1911 - RNA, 17 nt, synthetic construct
  source 1..17: mol_type = other RNA; note = RTT*1
aaattctgcaatcctca

SEQ ID NO: 1912 - RNA, 18 nt, synthetic construct
  source 1..18: mol_type = other RNA; note = RTT (GGA-to-GGG PAM silencing edit)
caaattctgcaaccctca

SEQ ID NO: 1913 - RNA, 18 nt, synthetic construct
  source 1..18: mol_type = other RNA; note = RTT*1
caaattctgcaatcctca

SEQ ID NO: 1914 - RNA, 19 nt, synthetic construct
  source 1..19: mol_type = other RNA; note = RTT (GGA-to-GGG PAM silencing edit)
acaaattctgcaaccctca

SEQ ID NO: 1915 - RNA, 19 nt, synthetic construct
  source 1..19: mol_type = other RNA; note = RTT*1
acaaattctgcaatcctca

SEQ ID NO: 1916 - RNA, 20 nt, synthetic construct
  source 1..20: mol_type = other RNA; note = RTT (GGA-to-GGG PAM silencing edit)
aacaaattctgcaaccctca

SEQ ID NO: 1917 - RNA, 20 nt, synthetic construct
  source 1..20: mol_type = other RNA; note = RTT*1
aacaaattctgcaatcctca

SEQ ID NO: 1918 - RNA, 21 nt, synthetic construct
  source 1..21: mol_type = other RNA; note = RTT (GGA-to-GGG PAM silencing edit)
gaacaaattctgcaaccctca

SEQ ID NO: 1919 - RNA, 21 nt, synthetic construct
  source 1..21: mol_type = other RNA; note = RTT*1
gaacaaattctgcaatcctca

SEQ ID NO: 1920 - RNA, 22 nt, synthetic construct
  source 1..22: mol_type = other RNA; note = RTT (GGA-to-GGG PAM silencing edit)
tgaacaaattctgcaaccctca

SEQ ID NO: 1921 - RNA, 22 nt, synthetic construct
  source 1..22: mol_type = other RNA; note = RTT*1
tgaacaaattctgcaatcctca

SEQ ID NO: 1922 - RNA, 23 nt, synthetic construct
  source 1..23: mol_type = other RNA; note = RTT (GGA-to-GGG PAM silencing edit)
gtgaacaaattctgcaaccctca

SEQ ID NO: 1923 - RNA, 23 nt, synthetic construct
  source 1..23: mol_type = other RNA; note = RTT*1
gtgaacaaattctgcaatcctca

SEQ ID NO: 1924 - RNA, 24 nt, synthetic construct
  source 1..24: mol_type = other RNA; note = RTT (GGA-to-GGG PAM silencing edit)
agtgaacaaattctgcaaccctca

SEQ ID NO: 1925 - RNA, 24 nt, synthetic construct
  source 1..24: mol_type = other RNA; note = RTT*1
agtgaacaaattctgcaatcctca

SEQ ID NO: 1926 - RNA, 25 nt, synthetic construct
  source 1..25: mol_type = other RNA; note = RTT (GGA-to-GGG PAM silencing edit)
cagtgaacaaattctgcaaccctca

SEQ ID NO: 1927 - RNA, 25 nt, synthetic construct
  source 1..25: mol_type = other RNA; note = RTT*1
cagtgaacaaattctgcaatcctca

SEQ ID NO: 1928 - RNA, 26 nt, synthetic construct
  source 1..26: mol_type = other RNA; note = RTT (GGA-to-GGG PAM silencing edit)
tcagtgaacaaattctgcaaccctca

SEQ ID NO: 1929 - RNA, 26 nt, synthetic construct
  source 1..26: mol_type = other RNA; note = RTT*1
tcagtgaacaaattctgcaatcctca

SEQ ID NO: 1930 - RNA, 27 nt, synthetic construct
  source 1..27: mol_type = other RNA; note = RTT (GGA-to-GGG PAM silencing edit)
ctcagtgaacaaattctgcaaccctca

SEQ ID NO: 1931 - RNA, 27 nt, synthetic construct
  source 1..27: mol_type = other RNA; note = RTT*1
ctcagtgaacaaattctgcaatcctca

SEQ ID NO: 1932 - RNA, 28 nt, synthetic construct
  source 1..28: mol_type = other RNA; note = RTT (GGA-to-GGG PAM silencing edit)
gctcagtgaacaaattctgcaaccctca

SEQ ID NO: 1933 - RNA, 28 nt, synthetic construct
  source 1..28: mol_type = other RNA; note = RTT*1
gctcagtgaacaaattctgcaatcctca

SEQ ID NO: 1934 - RNA, 29 nt, synthetic construct
  source 1..29: mol_type = other RNA; note = RTT (GGA-to-GGG PAM silencing edit)
ggctcagtgaacaaattctgcaaccctca

SEQ ID NO: 1935 - RNA, 29 nt, synthetic construct
  source 1..29: mol_type = other RNA; note = RTT*1
ggctcagtgaacaaattctgcaatcctca

SEQ ID NO: 1936 - RNA, 30 nt, synthetic construct
  source 1..30: mol_type = other RNA; note = RTT (GGA-to-GGG PAM silencing edit)
tggctcagtgaacaaattctgcaaccctca

SEQ ID NO: 1937 - RNA, 30 nt, synthetic construct
  source 1..30: mol_type = other RNA; note = RTT*1
tggctcagtgaacaaattctgcaatcctca

SEQ ID NO: 1938 - RNA, 31 nt, synthetic construct
  source 1..31: mol_type = other RNA; note = RTT (GGA-to-GGG PAM silencing edit)
atggctcagtgaacaaattctgcaaccctca

SEQ ID NO: 1939 - RNA, 31 nt, synthetic construct
  source 1..31: mol_type = other RNA; note = RTT*1
atggctcagtgaacaaattctgcaatcctca

SEQ ID NO: 1940 - RNA, 32 nt, synthetic construct
  source 1..32: mol_type = other RNA; note = RTT (GGA-to-GGG PAM silencing edit)
catggctcagtgaacaaattctgcaaccctca

SEQ ID NO: 1941 - RNA, 32 nt, synthetic construct
  source 1..32: mol_type = other RNA; note = RTT*1
catggctcagtgaacaaattctgcaatcctca

SEQ ID NO: 1942 - RNA, 33 nt, synthetic construct
  source 1..33: mol_type = other RNA; note = RTT (GGA-to-GGG PAM silencing edit)
ccatggctcagtgaacaaattctgcaaccctca

SEQ ID NO: 1943 - RNA, 33 nt, synthetic construct
  source 1..33: mol_type = other RNA; note = RTT*1
ccatggctcagtgaacaaattctgcaatcctca

SEQ ID NO: 1944 - RNA, 34 nt, synthetic construct
  source 1..34: mol_type = other RNA; note = RTT (GGA-to-GGG PAM silencing edit)
tccatggctcagtgaacaaattctgcaaccctca

SEQ ID NO: 1945 - RNA, 34 nt, synthetic construct
  source 1..34: mol_type = other RNA; note = RTT*1
tccatggctcagtgaacaaattctgcaatcctca

SEQ ID NO: 1946 - RNA, 35 nt, synthetic construct
  source 1..35: mol_type = other RNA; note = RTT (GGA-to-GGG PAM silencing edit)
ctccatggctcagtgaacaaattctgcaaccctca

SEQ ID NO: 1947 - RNA, 35 nt, synthetic construct
  source 1..35: mol_type = other RNA; note = RTT*1
ctccatggctcagtgaacaaattctgcaatcctca

SEQ ID NO: 1948 - RNA, 36 nt, synthetic construct
  source 1..36: mol_type = other RNA; note = RTT (GGA-to-GGG PAM silencing edit)
cctccatggctcagtgaacaaattctgcaaccctca

SEQ ID NO: 1949 - RNA, 36 nt, synthetic construct
  source 1..36: mol_type = other RNA; note = RTT*1
cctccatggctcagtgaacaaattctgcaatcctca

SEQ ID NO: 1950 - RNA, 37 nt, synthetic construct
  source 1..37: mol_type = other RNA; note = RTT (GGA-to-GGG PAM silencing edit)
acctccatggctcagtgaacaaattctgcaaccctca

SEQ ID NO: 1951 - RNA, 37 nt, synthetic construct
  source 1..37: mol_type = other RNA; note = RTT*1
acctccatggctcagtgaacaaattctgcaatcctca

SEQ ID NO: 1952 - RNA, 38 nt, synthetic construct
  source 1..38: mol_type = other RNA; note = RTT (GGA-to-GGG PAM silencing edit)
aacctccatggctcagtgaacaaattctgcaaccctca

SEQ ID NO: 1953 - RNA, 38 nt, synthetic construct
  source 1..38: mol_type = other RNA; note = RTT*1
aacctccatggctcagtgaacaaattctgcaatcctca

SEQ ID NO: 1954 - RNA, 39 nt, synthetic construct
  source 1..39: mol_type = other RNA; note = RTT (GGA-to-GGG PAM silencing edit)
taacctccatggctcagtgaacaaattctgcaaccctca

SEQ ID NO: 1955 - RNA, 39 nt, synthetic construct
  source 1..39: mol_type = other RNA; note = RTT*1
taacctccatggctcagtgaacaaattctgcaatcctca

SEQ ID NO: 1956 - RNA, 40 nt, synthetic construct
  source 1..40: mol_type = other RNA; note = RTT (GGA-to-GGG PAM silencing edit)
gtaacctccatggctcagtgaacaaattctgcaaccctca

SEQ ID NO: 1957 - RNA, 40 nt, synthetic construct
  source 1..40: mol_type = other RNA; note = RTT*1
gtaacctccatggctcagtgaacaaattctgcaatcctca

SEQ ID NO: 1958 - RNA, 118 nt, synthetic construct
  source 1..118: mol_type = other RNA; note = pegRNA
actcacactgcccagagtgagttttagagctagaaatagcaagttaaaataaggctagtccgttatcaacttgaaaaagtggcaccgagtcggtgcttctgcaatcctcactctgggc

SEQ ID NO: 1959 - RNA, 120 nt, synthetic construct
  source 1..120: mol_type = other RNA; note = pegRNA
actcacactgcccagagtgagttttagagctagaaatagcaagttaaaataaggctagtccgttatcaacttgaaaaagtggcaccgagtcggtgcaattctgcaatcctcactctgggc

SEQ ID NO: 1960 - RNA, 120 nt, synthetic construct
  source 1..120: mol_type = other RNA; note = pegRNA
actcacactgcccagagtgagttttagagctagaaatagcaagttaaaataaggctagtccgttatcaacttgaaaaagtggcaccgagtcggtgcttctgcaatcctcactctgggcag

SEQ ID NO: 1961 - RNA, 122 nt, synthetic construct
  source 1..122: mol_type = other RNA; note = pegRNA
actcacactgcccagagtgagttttagagctagaaatagcaagttaaaataaggctagtccgttatcaacttgaaaaagtggcaccgagtcggtgcaattctgcaatcctcactctgggcag

SEQ ID NO: 1962 - RNA, 122 nt, synthetic construct
  source 1..122: mol_type = other RNA; note = pegRNA
actcacactgcccagagtgagttttagagctagaaatagcaagttaaaataaggctagtccgttatcaacttgaaaaagtggcaccgagtcggtgcttctgcaatcctcactctgggcagtg

SEQ ID NO: 1963 - RNA, 122 nt, synthetic construct
  source 1..122: mol_type = other RNA; note = pegRNA
actcacactgcccagagtgagttttagagctagaaatagcaagttaaaataaggctagtccgttatcaacttgaaaaagtggcaccgagtcggtgcttctgcaatcctcactctgggctttt

SEQ ID NO: 1964 - RNA, 123 nt, synthetic construct
  source 1..123: mol_type = other RNA; note = pegRNA
actcacactgcccagagtgagttttagagctagaaatagcaagttaaaataaggctagtccgttatcaacttgaaaaagtggcaccgagtcggtgcacaaattctgcaatcctcactctgggc

SEQ ID NO: 1965 - RNA, 124 nt, synthetic construct
  source 1..124: mol_type = other RNA; note = pegRNA
actcacactgcccagagtgagttttagagctagaaatagcaagttaaaataaggctagtccgttatcaacttgaaaaagtggcaccgagtcggtgcaacaaattctgcaatcctcactctgggc

SEQ ID NO: 1966 - RNA, 124 nt, synthetic construct
  source 1..124: mol_type = other RNA; note = pegRNA
actcacactgcccagagtgagttttagagctagaaatagcaagttaaaataaggctagtccgttatcaacttgaaaaagtggcaccgagtcggtgcaattctgcaatcctcactctgggcagtg

SEQ ID NO: 1967 - RNA, 124 nt, synthetic construct
  source 1..124: mol_type = other RNA; note = pegRNA
actcacactgcccagagtgagttttagagctagaaatagcaagttaaaataaggctagtccgttatcaacttgaaaaagtggcaccgagtcggtgcaattctgcaatcctcactctgggctttt

SEQ ID NO: 1968 - RNA, 124 nt, synthetic construct
  source 1..124: mol_type = other RNA; note = pegRNA
actcacactgcccagagtgagttttagagctagaaatagcaagttaaaataaggctagtccgttatcaacttgaaaaagtggcaccgagtcggtgcttctgcaatcctcactctgggcagtgtg

SEQ ID NO: 1969 - RNA, 124 nt, synthetic construct
  source 1..124: mol_type = other RNA; note = pegRNA
actcacactgcccagagtgagttttagagctagaaatagcaagttaaaataaggctagtccgttatcaacttgaaaaagtggcaccgagtcggtgcttctgcaatcctcactctgggcagtttt

SEQ ID NO: 1970 - RNA, 125 nt, synthetic construct
  source 1..125: mol_type = other RNA; note = pegRNA
actcacactgcccagagtgagttttagagctagaaatagcaagttaaaataaggctagtccgttatcaacttgaaaaagtggcaccgagtcggtgcacaaattctgcaatcctcactctgggcag

SEQ ID NO: 1971 - RNA, 126 nt, synthetic construct
  source 1..126: mol_type = other RNA; note = pegRNA
actcacactgcccagagtgagttttagagctagaaatagcaagttaaaataaggctagtccgttatcaacttgaaaaagtggcaccgagtcggtgcaacaaattctgcaatcctcactctgggcag

SEQ ID NO: 1972 - RNA, 126 nt, synthetic construct
  source 1..126: mol_type = other RNA; note = pegRNA
actcacactgcccagagtgagttttagagctagaaatagcaagttaaaataaggctagtccgttatcaacttgaaaaagtggcaccgagtcggtgcaattctgcaatcctcactctgggcagtgtg

SEQ ID NO: 1973 - RNA, 126 nt, synthetic construct
  source 1..126: mol_type = other RNA; note = pegRNA
actcacactgcccagagtgagttttagagctagaaatagcaagttaaaataaggctagtccgttatcaacttgaaaaagtggcaccgagtcggtgcaattctgcaatcctcactctgggcagtttt

SEQ ID NO: 1974 - RNA, 126 nt, synthetic construct
  source 1..126: mol_type = other RNA; note = pegRNA
actcacactgcccagagtgagttttagagctagaaatagcaagttaaaataaggctagtccgttatcaacttgaaaaagtggcaccgagtcggtgcttctgcaatcctcactctgggcagtgtttt

SEQ ID NO: 1975 - RNA, 127 nt, synthetic construct
  source 1..127: mol_type = other RNA; note = pegRNA
actcacactgcccagagtgagttttagagctagaaatagcaagttaaaataaggctagtccgttatcaacttgaaaaagtggcaccgagtcggtgcacaaattctgcaatcctcactctgggcagtg

SEQ ID NO: 1976 - RNA, 127 nt, synthetic construct
  source 1..127: mol_type = other RNA; note = pegRNA
actcacactgcccagagtgagttttagagctagaaatagcaagttaaaataaggctagtccgttatcaacttgaaaaagtggcaccgagtcggtgcacaaattctgcaatcctcactctgggctttt

SEQ ID NO: 1977 - RNA, 128 nt, synthetic construct
  source 1..128: mol_type = other RNA; note = pegRNA
actcacactgcccagagtgagttttagagctagaaatagcaagttaaaataaggctagtccgttatcaacttgaaaaagtggcaccgagtcggtgcaacaaattctgcaatcctcactctgggcagtg

SEQ ID NO: 1978 - RNA, 128 nt, synthetic construct
  source 1..128: mol_type = other RNA; note = pegRNA
actcacactgcccagagtgagttttagagctagaaatagcaagttaaaataaggctagtccgttatcaacttgaaaaagtggcaccgagtcggtgcaacaaattctgcaatcctcactctgggctttt

SEQ ID NO: 1979 - RNA, 128 nt, synthetic construct
  source 1..128: mol_type = other RNA; note = pegRNA
actcacactgcccagagtgagttttagagctagaaatagcaagttaaaataaggctagtccgttatcaacttgaaaaagtggcaccgagtcggtgcaattctgcaatcctcactctgggcagtgtttt

SEQ ID NO: 1980 - RNA, 128 nt, synthetic construct
  source 1..128: mol_type = other RNA; note = pegRNA
actcacactgcccagagtgagttttagagctagaaatagcaagttaaaataaggctagtccgttatcaacttgaaaaagtggcaccgagtcggtgcttctgcaatcctcactctgggcagtgtgtttt

SEQ ID NO: 1981 - RNA, 129 nt, synthetic construct
  source 1..129: mol_type = other RNA; note = pegRNA
actcacactgcccagagtgagttttagagctagaaatagcaagttaaaataaggctagtccgttatcaacttgaaaaagtggcaccgagtcggtgcacaaattctgcaatcctcactctgggcagtgtg

SEQ ID NO: 1982 - RNA, 129 nt, synthetic construct
  source 1..129: mol_type = other RNA; note = pegRNA
actcacactgcccagagtgagttttagagctagaaatagcaagttaaaataaggctagtccgttatcaacttgaaaaagtggcaccgagtcggtgcacaaattctgcaatcctcactctgggcagtttt

SEQ ID NO: 1983 - RNA, 130 nt, synthetic construct
  source 1..130: mol_type = other RNA; note = pegRNA
actcacactgcccagagtgagttttagagctagaaatagcaagttaaaataaggctagtccgttatcaacttgaaaaagtggcaccgagtcggtgcaacaaattctgcaatcctcactctgggcagtgtg

SEQ ID NO: 1984 - RNA, 130 nt, synthetic construct
  source 1..130: mol_type = other RNA; note = pegRNA
actcacactgcccagagtgagttttagagctagaaatagcaagttaaaataaggctagtccgttatcaacttgaaaaagtggcaccgagtcggtgcaacaaattctgcaatcctcactctgggcagtttt

SEQ ID NO: 1985 - RNA, 130 nt, synthetic construct
  source 1..130: mol_type = other RNA; note = pegRNA
actcacactgcccagagtgagttttagagctagaaatagcaagttaaaataaggctagtccgttatcaacttgaaaaagtggcaccgagtcggtgcaattctgcaatcctcactctgggcagtgtgtttt

SEQ ID NO: 1986 - RNA, 131 nt, synthetic construct
  source 1..131: mol_type = other RNA; note = pegRNA
actcacactgcccagagtgagttttagagctagaaatagcaagttaaaataaggctagtccgttatcaacttgaaaaagtggcaccgagtcggtgcacaaattctgcaatcctcactctgggcagtgtttt

SEQ ID NO: 1987 - RNA, 132 nt, synthetic construct
  source 1..132: mol_type = other RNA; note = pegRNA
actcacactgcccagagtgagttttagagctagaaatagcaagttaaaataaggctagtccgttatcaacttgaaaaagtggcaccgagtcggtgcaacaaattctgcaatcctcactctgggcagtgtttt

SEQ ID NO: 1988 - RNA, 133 nt, synthetic construct
  source 1..133: mol_type = other RNA; note = pegRNA
actcacactgcccagagtgagttttagagctagaaatagcaagttaaaataaggctagtccgttatcaacttgaaaaagtggcaccgagtcggtgcacaaattctgcaatcctcactctgggcagtgtgtttt

SEQ ID NO: 1989 - RNA, 134 nt, synthetic construct
  source 1..134: mol_type = other RNA; note = pegRNA
actcacactgcccagagtgagttttagagctagaaatagcaagttaaaataaggctagtccgttatcaacttgaaaaagtggcaccgagtcggtgcaacaaattctgcaatcctcactctgggcagtgtgtttt

SEQ ID NO: 1990-1994 - skipped (5 entries)

SEQ ID NO: 1995 - RNA, 10 nt, synthetic construct
  source 1..10: mol_type = other RNA; note = PBS
tctgggcagt

SEQ ID NO: 1996 - RNA, 11 nt, synthetic construct
  source 1..11: mol_type = other RNA; note = PBS
tctgggcagtg

SEQ ID NO: 1997 - RNA, 12 nt, synthetic construct
  source 1..12: mol_type = other RNA; note = PBS
tctgggcagtgt

SEQ ID NO: 1998 - RNA, 13 nt, synthetic construct
  source 1..13: mol_type = other RNA; note = PBS
tctgggcagtgtg

SEQ ID NO: 1999 - RNA, 14 nt, synthetic construct
  source 1..14: mol_type = other RNA; note = PBS
tctgggcagtgtga

SEQ ID NO: 2000 - RNA, 15 nt, synthetic construct
  source 1..15: mol_type = other RNA; note = PBS
tctgggcagtgtgag

SEQ ID NO: 2001 - RNA, 16 nt, synthetic construct
  source 1..16: mol_type = other RNA; note = PBS
tctgggcagtgtgagt

SEQ ID NO: 2002 - RNA, 17 nt, synthetic construct
  source 1..17: mol_type = other RNA; note = PBS
tctgggcagtgtgagtg

SEQ ID NO: 2003 - RNA, 18 nt, synthetic construct
  source 1..18: mol_type = other RNA; note = PBS
tctgggcagtgtgagtgc

SEQ ID NO: 2004 - RNA, 19 nt, synthetic construct
  source 1..19: mol_type = other RNA; note = PBS
tctgggcagtgtgagtgca

SEQ ID NO: 2005 - RNA, 17 nt, synthetic construct
  source 1..17: mol_type = other RNA; note = PEgRNA spacer (AG;AGG PAM)
tcacactgcccagagtg

SEQ ID NO: 2006 - RNA, 18 nt, synthetic construct
  source 1..18: mol_type = other RNA; note = PEgRNA spacer (AG;AGG PAM)
ctcacactgcccagagtg

SEQ ID NO: 2007 - RNA, 19 nt, synthetic construct
  source 1..19: mol_type = other RNA; note = PEgRNA spacer (AG;AGG PAM)
actcacactgcccagagtg

SEQ ID NO: 2008 - RNA, 20 nt, synthetic construct
  source 1..20: mol_type = other RNA; note = PE3b*2 ngRNA spacer (AG;AGG PAM)
cactcacactgcccagagtg

SEQ ID NO: 2009 - RNA, 21 nt, synthetic construct
  source 1..21: mol_type = other RNA; note = PEgRNA spacer (AG;AGG PAM)
gcactcacactgcccagagtg

SEQ ID NO: 2010 - RNA, 22 nt, synthetic construct
  source 1..22: mol_type = other RNA; note = PEgRNA spacer (AG;AGG PAM)
tgcactcacactgcccagagtg

SEQ ID NO: 2011 - RNA, 12 nt, synthetic construct
  source 1..12: mol_type = other RNA; note = RTT
tgcaatcctcac

SEQ ID NO: 2012 - RNA, 13 nt, synthetic construct
  source 1..13: mol_type = other RNA; note = RTT
ctgcaatcctcac

SEQ ID NO: 2013 - RNA, 14 nt, synthetic construct
  source 1..14: mol_type = other RNA; note = RTT
tctgcaatcctcac

SEQ ID NO: 2014 - RNA, 15 nt, synthetic construct
  source 1..15: mol_type = other RNA; note = RTT
ttctgcaatcctcac

SEQ ID NO: 2015 - RNA, 16 nt, synthetic construct
  source 1..16: mol_type = other RNA; note = RTT
attctgcaatcctcac

SEQ ID NO: 2016 - RNA, 17 nt, synthetic construct
  source 1..17: mol_type = other RNA; note = RTT
aattctgcaatcctcac

SEQ ID NO: 2017 - RNA, 18 nt, synthetic construct
  source 1..18: mol_type = other RNA; note = RTT
aaattctgcaatcctcac

SEQ ID NO: 2018 - RNA, 19 nt, synthetic construct
  source 1..19: mol_type = other RNA; note = RTT
caaattctgcaatcctcac

SEQ ID NO: 2019 - RNA, 20 nt, synthetic construct
  source 1..20: mol_type = other RNA; note = RTT
acaaattctgcaatcctcac

SEQ ID NO: 2020 - RNA, 21 nt, synthetic construct
  source 1..21: mol_type = other RNA; note = RTT
aacaaattctgcaatcctcac

SEQ ID NO: 2021 - RNA, 22 nt, synthetic construct
  source 1..22: mol_type = other RNA; note = RTT
gaacaaattctgcaatcctcac

SEQ ID NO: 2022 - RNA, 23 nt, synthetic construct
  source 1..23: mol_type = other RNA; note = RTT
tgaacaaattctgcaatcctcac

SEQ ID NO: 2023 - RNA, 24 nt, synthetic construct
  source 1..24: mol_type = other RNA; note = RTT
gtgaacaaattctgcaatcctcac

SEQ ID NO: 2024 - RNA, 25 nt, synthetic construct
  source 1..25: mol_type = other RNA; note = RTT
agtgaacaaattctgcaatcctcac

SEQ ID NO: 2025 - RNA, 26 nt, synthetic construct
  source 1..26: mol_type = other RNA; note = RTT
cagtgaacaaattctgcaatcctcac

SEQ ID NO: 2026 - RNA, 27 nt, synthetic construct
  source 1..27: mol_type = other RNA; note = RTT
tcagtgaacaaattctgcaatcctcac

SEQ ID NO: 2027 - RNA, 28 nt, synthetic construct
  source 1..28: mol_type = other RNA; note = RTT
ctcagtgaacaaattctgcaatcctcac

SEQ ID NO: 2028 - RNA, 29 nt, synthetic construct
  source 1..29: mol_type = other RNA; note = RTT
gctcagtgaacaaattctgcaatcctcac

SEQ ID NO: 2029 - RNA, 30 nt, synthetic construct
  source 1..30: mol_type = other RNA; note = RTT
ggctcagtgaacaaattctgcaatcctcac

SEQ ID NO: 2030 - RNA, 31 nt, synthetic construct
  source 1..31: mol_type = other RNA; note = RTT
tggctcagtgaacaaattctgcaatcctcac

SEQ ID NO: 2031 - RNA, 32 nt, synthetic construct
  source 1..32: mol_type = other RNA; note = RTT
atggctcagtgaacaaattctgcaatcctcac

SEQ ID NO: 2032 - RNA, 33 nt, synthetic construct
  source 1..33: mol_type = other RNA; note = RTT
catggctcagtgaacaaattctgcaatcctcac

SEQ ID NO: 2033 - RNA, 34 nt, synthetic construct
  source 1..34: mol_type = other RNA; note = RTT
ccatggctcagtgaacaaattctgcaatcctcac

SEQ ID NO: 2034 - RNA, 35 nt, synthetic construct
  source 1..35: mol_type = other RNA; note = RTT
tccatggctcagtgaacaaattctgcaatcctcac

SEQ ID NO: 2035 - RNA, 36 nt, synthetic construct
  source 1..36: mol_type = other RNA; note = RTT
ctccatggctcagtgaacaaattctgcaatcctcac

SEQ ID NO: 2036 - RNA, 37 nt, synthetic construct
  source 1..37: mol_type = other RNA; note = RTT
cctccatggctcagtgaacaaattctgcaatcctcac

SEQ ID NO: 2037 - RNA, 38 nt, synthetic construct
  source 1..38: mol_type = other RNA; note = RTT
acctccatggctcagtgaacaaattctgcaatcctcac

SEQ ID NO: 2038 - RNA, 39 nt, synthetic construct
  source 1..39: mol_type = other RNA; note = RTT
aacctccatggctcagtgaacaaattctgcaatcctcac

SEQ ID NO: 2039 - RNA, 40 nt, synthetic construct
  source 1..40: mol_type = other RNA; note = RTT
taacctccatggctcagtgaacaaattctgcaatcctcac

SEQ ID NO: 2040 - RNA, 119 nt, synthetic construct
  source 1..119: mol_type = other RNA; note = pegRNA
cactcacactgcccagagtggttttagagctagaaatagcaagttaaaataaggctagtccgttatcaacttgaaaaagtggcaccgagtcggtgcttctgcaatcctcactctgggca

SEQ ID NO: 2041 - RNA, 121 nt, synthetic construct
  source 1..121: mol_type = other RNA; note = pegRNA
cactcacactgcccagagtggttttagagctagaaatagcaagttaaaataaggctagtccgttatcaacttgaaaaagtggcaccgagtcggtgcaattctgcaatcctcactctgggca

SEQ ID NO: 2042 - RNA, 121 nt, synthetic construct
  source 1..121: mol_type = other RNA; note = pegRNA
cactcacactgcccagagtggttttagagctagaaatagcaagttaaaataaggctagtccgttatcaacttgaaaaagtggcaccgagtcggtgcttctgcaatcctcactctgggcagt

SEQ ID NO: 2043 - RNA, 123 nt, synthetic construct
  source 1..123: mol_type = other RNA; note = pegRNA
cactcacactgcccagagtggttttagagctagaaatagcaagttaaaataaggctagtccgttatcaacttgaaaaagtggcaccgagtcggtgcaattctgcaatcctcactctgggcagt

SEQ ID NO: 2044 - RNA, 123 nt, synthetic construct
  source 1..123: mol_type = other RNA; note = pegRNA
cactcacactgcccagagtggttttagagctagaaatagcaagttaaaataaggctagtccgttatcaacttgaaaaagtggcaccgagtcggtgcttctgcaatcctcactctgggcagtgt

SEQ ID NO: 2045 - RNA, 123 nt, synthetic construct
  source 1..123: mol_type = other RNA; note = pegRNA
cactcacactgcccagagtggttttagagctagaaatagcaagttaaaataaggctagtccgttatcaacttgaaaaagtggcaccgagtcggtgcttctgcaatcctcactctgggcatttt

SEQ ID NO: 2046 - RNA, 124 nt, synthetic construct
  source 1..124: mol_type = other RNA; note = pegRNA
cactcacactgcccagagtggttttagagctagaaatagcaagttaaaataaggctagtccgttatcaacttgaaaaagtggcaccgagtcggtgcacaaattctgcaatcctcactctgggca

SEQ ID NO: 2047 - RNA, 125 nt, synthetic construct
  source 1..125: mol_type = other RNA; note = pegRNA
cactcacactgcccagagtggttttagagctagaaatagcaagttaaaataaggctagtccgttatcaacttgaaaaagtggcaccgagtcggtgcaacaaattctgcaatcctcactctgggca

SEQ ID NO: 2048 - RNA, 125 nt, synthetic construct
  source 1..125: mol_type = other RNA; note = pegRNA
cactcacactgcccagagtggttttagagctagaaatagcaagttaaaataaggctagtccgttatcaacttgaaaaagtggcaccgagtcggtgcaattctgcaatcctcactctgggcagtgt

SEQ ID NO: 2049 - RNA, 125 nt, synthetic construct
  source 1..125: mol_type = other RNA; note = pegRNA
cactcacactgcccagagtggttttagagctagaaatagcaagttaaaataaggctagtccgttatcaacttgaaaaagtggcaccgagtcggtgcaattctgcaatcctcactctgggcatttt

SEQ ID NO: 2050 - RNA, 125 nt, synthetic construct
  source 1..125: mol_type = other RNA; note = pegRNA
cactcacactgcccagagtggttttagagctagaaatagcaagttaaaataaggctagtccgttatcaacttgaaaaagtggcaccgagtcggtgcttctgcaatcctcactctgggcagtgtga

SEQ ID NO: 2051 - RNA, 125 nt, synthetic construct
  source 1..125: mol_type = other RNA; note = pegRNA
cactcacactgcccagagtggttttagagctagaaatagcaagttaaaataaggctagtccgttatcaacttgaaaaagtggcaccgagtcggtgcttctgcaatcctcactctgggcagttttt

SEQ ID NO: 2052 - RNA, 126 nt, synthetic construct
  source 1..126: mol_type = other RNA; note = pegRNA
cactcacactgcccagagtggttttagagctagaaatagcaagttaaaataaggctagtccgttatcaacttgaaaaagtggcaccgagtcggtgcacaaattctgcaatcctcactctgggcagt

SEQ ID NO: 2053 - RNA, 127 nt, synthetic construct
  source 1..127: mol_type = other RNA; note = pegRNA
cactcacactgcccagagtggttttagagctagaaatagcaagttaaaataaggctagtccgttatcaacttgaaaaagtggcaccgagtcggtgcaacaaattctgcaatcctcactctgggcagt

SEQ ID NO: 2054 - RNA, 127 nt, synthetic construct
  source 1..127: mol_type = other RNA; note = pegRNA
cactcacactgcccagagtggttttagagctagaaatagcaagttaaaataaggctagtccgttatcaacttgaaaaagtggcaccgagtcggtgcaattctgcaatcctcactctgggcagtgtga

SEQ ID NO: 2055 - RNA, 127 nt, synthetic construct
  source 1..127: mol_type = other RNA; note = pegRNA
cactcacactgcccagagtggttttagagctagaaatagcaagttaaaataaggctagtccgttatcaacttgaaaaagtggcaccgagtcggtgcaattctgcaatcctcactctgggcagttttt

SEQ ID NO: 2056 - RNA, 127 nt, synthetic construct
  source 1..127: mol_type = other RNA; note = pegRNA
cactcacactgcccagagtggttttagagctagaaatagcaagttaaaataaggctagtccgttatcaacttgaaaaagtggcaccgagtcggtgcttctgcaatcctcactctgggcagtgttttt

SEQ ID NO: 2057 - RNA, 128 nt, synthetic construct
  source 1..128: mol_type = other RNA; note = pegRNA
cactcacactgcccagagtggttttagagctagaaatagcaagttaaaataaggctagtccgttatcaacttgaaaaagtggcaccgagtcggtgcacaaattctgcaatcctcactctgggcagtgt

SEQ ID NO: 2058 - RNA, 128 nt, synthetic construct
  source 1..128: mol_type = other RNA; note = pegRNA
cactcacactgcccagagtggttttagagctagaaatagcaagttaaaataaggctagtccgttatcaacttgaaaaagtggcaccgagtcggtgcacaaattctgcaatcctcactctgggcatttt

SEQ ID NO: 2059 - RNA, 129 nt, synthetic construct
  source 1..129: mol_type = other RNA; note = pegRNA
cactcacactgcccagagtggttttagagctagaaatagcaagttaaaataaggctagtccgttatcaacttgaaaaagtggcaccgagtcggtgcaacaaattctgcaatcctcactctgggcagtgt

SEQ ID NO: 2060 - RNA, 129 nt, synthetic construct
  source 1..129: mol_type = other RNA; note = pegRNA
cactcacactgcccagagtggttttagagctagaaatagcaagttaaaataaggctagtccgttatcaacttgaaaaagtggcaccgagtcggtgcaacaaattctgcaatcctcactctgggcatttt

SEQ ID NO: 2061 - RNA, 129 nt, synthetic construct
  source 1..129: mol_type = other RNA; note = pegRNA
cactcacactgcccagagtggttttagagctagaaatagcaagttaaaataaggctagtccgttatcaacttgaaaaagtggcaccgagtcggtgcaattctgcaatcctcactctgggcagtgttttt

SEQ ID NO: 2062 - RNA, 129 nt, synthetic construct
  source 1..129: mol_type = other RNA; note = pegRNA
cactcacactgcccagagtggttttagagctagaaatagcaagttaaaataaggctagtccgttatcaacttgaaaaagtggcaccgagtcggtgcttctgcaatcctcactctgggcagtgtgatttt

SEQ ID NO: 2063 - RNA, 130 nt, synthetic construct
  source 1..130: mol_type = other RNA; note = pegRNA
cactcacactgcccagagtggttttagagctagaaatagcaagttaaaataaggctagtccgttatcaacttgaaaaagtggcaccgagtcggtgcacaaattctgcaatcctcactctgggcagtgtga

SEQ ID NO: 2064 - RNA, 130 nt, synthetic construct
  source 1..130: mol_type = other RNA; note = pegRNA
cactcacactgcccagagtggttttagagctagaaatagcaagttaaaataaggctagtccgttatcaacttgaaaaagtggcaccgagtcggtgcacaaattctgcaatcctcactctgggcagttttt

SEQ ID NO: 2065 - RNA, 131 nt, synthetic construct
  source 1..131: mol_type = other RNA; note = pegRNA
cactcacactgcccagagtggttttagagctagaaatagcaagttaaaataaggctagtccgttatcaacttgaaaaagtggcaccgagtcggtgcaacaaattctgcaatcctcactctgggcagtgtga

SEQ ID NO: 2066 - RNA, 131 nt, synthetic construct
  source 1..131: mol_type = other RNA; note = pegRNA
cactcacactgcccagagtggttttagagctagaaatagcaagttaaaataaggctagtccgttatcaacttgaaaaagtggcaccgagtcggtgcaacaaattctgcaatcctcactctgggcagttttt

SEQ ID NO: 2067 - RNA, 131 nt, synthetic construct
  source 1..131: mol_type = other RNA; note = pegRNA
cactcacactgcccagagtggttttagagctagaaatagcaagttaaaataaggctagtccgttatcaacttgaaaaagtggcaccgagtcggtgcaattctgcaatcctcactctgggcagtgtgatttt

SEQ ID NO: 2068 - RNA, 132 nt, synthetic construct
  source 1..132: mol_type = other RNA; note = pegRNA
cactcacactgcccagagtggttttagagctagaaatagcaagttaaaataaggctagtccgttatcaacttgaaaaagtggcaccgagtcggtgcacaaattctgcaatcctcactctgggcagtgttttt

SEQ ID NO: 2069 - RNA, 133 nt, synthetic construct
  source 1..133: mol_type = other RNA; note = pegRNA
cactcacactgcccagagtggttttagagctagaaatagcaagttaaaataaggctagtccgttatcaacttgaaaaagtggcaccgagtcggtgcaacaaattctgcaatcctcactctgggcagtgttttt

SEQ ID NO: 2070 - RNA, 134 nt, synthetic construct
  source 1..134: mol_type = other RNA; note = pegRNA
cactcacactgcccagagtggttttagagctagaaatagcaagttaaaataaggctagtccgttatcaacttgaaaaagtggcaccgagtcggtgcacaaattctgcaatcctcactctgggcagtgtgatttt

SEQ ID NO: 2071 - RNA, 135 nt, synthetic construct
  source 1..135: mol_type = other RNA; note = pegRNA
cactcacactgcccagagtggttttagagctagaaatagcaagttaaaataaggctagtccgttatcaacttgaaaaagtggcaccgagtcggtgcaacaaattctgcaatcctcactctgggcagtgtgatttt

SEQ ID NO: 2072-2076 - skipped (5 entries)

SEQ ID NO: 2077 - RNA, 10 nt, synthetic construct
  source 1..10: mol_type = other RNA; note = PBS
tgggcagtgt

SEQ ID NO: 2078 - RNA, 11 nt, synthetic construct
  source 1..11: mol_type = other RNA; note = PBS
tgggcagtgtg

SEQ ID NO: 2079 - RNA, 12 nt, synthetic construct
  source 1..12: mol_type = other RNA; note = PBS
tgggcagtgtga

SEQ ID NO: 2080 - RNA, 13 nt, synthetic construct
  source 1..13: mol_type = other RNA; note = PBS
tgggcagtgtgag

SEQ ID NO: 2081 - RNA, 14 nt, synthetic construct
  source 1..14: mol_type = other RNA; note = PBS
tgggcagtgtgagt

SEQ ID NO: 2082 - RNA, 15 nt, synthetic construct
  source 1..15: mol_type = other RNA; note = PBS
tgggcagtgtgagtg

SEQ ID NO: 2083 - RNA, 16 nt, synthetic construct
  source 1..16: mol_type = other RNA; note = PBS
tgggcagtgtgagtgc

SEQ ID NO: 2084 - RNA, 17 nt, synthetic construct
  source 1..17: mol_type = other RNA; note = PBS
tgggcagtgtgagtgca

SEQ ID NO: 2085 - RNA, 18 nt, synthetic construct
  source 1..18: mol_type = other RNA; note = PBS
tgggcagtgtgagtgcaa

SEQ ID NO: 2086 - RNA, 19 nt, synthetic construct
  source 1..19: mol_type = other RNA; note = PBS
tgggcagtgtgagtgcaaa

SEQ ID NO: 2087 - RNA, 17 nt, synthetic construct
  source 1..17: mol_type = other RNA; note = RTT*1,2,3,5,8,9,10
actcacactgcccagag

SEQ ID NO: 2088 - RNA, 18 nt, synthetic construct
  source 1..18: mol_type = other RNA; note = RTT*1,2,3,5,8,9,10
cactcacactgcccagag

SEQ ID NO: 2089 - RNA, 19 nt, synthetic construct
  source 1..19: mol_type = other RNA; note = RTT*1,2,3,5,8,9,10
gcactcacactgcccagag

SEQ ID NO: 2090 - RNA, 20 nt, synthetic construct
  source 1..20: mol_type = other RNA; note = PE3b*6 ngRNA spacer (TG PAM)
tgcactcacactgcccagag

SEQ ID NO: 2091 - RNA, 21 nt, synthetic construct
  source 1..21: mol_type = other RNA; note = RTT*1,2,3,5,8,9,10
ttgcactcacactgcccagag

SEQ ID NO: 2092 - RNA, 22 nt, synthetic construct
  source 1..22: mol_type = other RNA; note = RTT*1,2,3,5,8,9,10
tttgcactcacactgcccagag

SEQ ID NO: 2093 - RNA, 14 nt, synthetic construct
  source 1..14: mol_type = other RNA; note = RTT*1,2,3
tgcaatcctcactc

SEQ ID NO: 2094 - RNA, 15 nt, synthetic construct
  source 1..15: mol_type = other RNA; note = RTT*1,2,3
ctgcaatcctcactc

SEQ ID NO: 2095 - RNA, 16 nt, synthetic construct
  source 1..16: mol_type = other RNA; note = RTT*1,2,3
tctgcaatcctcactc

SEQ ID NO: 2096 - RNA, 17 nt, synthetic construct
  source 1..17: mol_type = other RNA; note = RTT (TGA-to-TGT PAM silencing edit)
ttctgcaatccacactc

SEQ ID NO: 2097 - RNA, 17 nt, synthetic construct
  source 1..17: mol_type = other RNA; note = RTT (TGA-to-TGG PAM silencing edit)
ttctgcaatccccactc

SEQ ID NO: 2098 - RNA, 17 nt, synthetic construct
  source 1..17: mol_type = other RNA; note = RTT (TGA-to-TGC PAM silencing edit)
ttctgcaatccgcactc

SEQ ID NO: 2099 - RNA, 17 nt, synthetic construct
  source 1..17: mol_type = other RNA; note = PEgRNA spacer (TG;TGG;TGGG PAM)
ttctgcaatcctcactc

SEQ ID NO: 2100 - RNA, 18 nt, synthetic construct
  source 1..18: mol_type = other RNA; note = RTT (TGA-to-TGT PAM silencing edit)
attctgcaatccacactc

SEQ ID NO: 2101 - RNA, 18 nt, synthetic construct
  source 1..18: mol_type = other RNA; note = RTT (TGA-to-TGG PAM silencing edit)
attctgcaatccccactc

SEQ ID NO: 2102 - RNA, 18 nt, synthetic construct
  source 1..18: mol_type = other RNA; note = RTT (TGA-to-TGC PAM silencing edit)
attctgcaatccgcactc

SEQ ID NO: 2103 - RNA, 18 nt, synthetic construct
  source 1..18: mol_type = other RNA; note = PEgRNA spacer (TG;TGG;TGGG PAM)
attctgcaatcctcactc

SEQ ID NO: 2104 - RNA, 19 nt, synthetic construct
  source 1..19: mol_type = other RNA; note = RTT (TGA-to-TGT PAM silencing edit)
aattctgcaatccacactc

SEQ ID NO: 2105 - RNA, 19 nt, synthetic construct
  source 1..19: mol_type = other RNA; note = RTT (TGA-to-TGG PAM silencing edit)
aattctgcaatccccactc

SEQ ID NO: 2106 - RNA, 19 nt, synthetic construct
  source 1..19: mol_type = other RNA; note = RTT (TGA-to-TGC PAM silencing edit)
aattctgcaatccgcactc

SEQ ID NO: 2107 - RNA, 19 nt, synthetic construct
  source 1..19: mol_type = other RNA; note = PEgRNA spacer (TG;TGG;TGGG PAM)
aattctgcaatcctcactc

SEQ ID NO: 2108 - RNA, 20 nt, synthetic construct
  source 1..20: mol_type = other RNA; note = RTT (TGA-to-TGT PAM silencing edit)
aaattctgcaatccacactc

SEQ ID NO: 2109 - RNA, 20 nt, synthetic construct
  source 1..20: mol_type = other RNA; note = RTT (TGA-to-TGG PAM silencing edit)
aaattctgcaatccccactc

SEQ ID NO: 2110 - RNA, 20 nt, synthetic construct
  source 1..20: mol_type = other RNA; note = RTT (TGA-to-TGC PAM silencing edit)
aaattctgcaatccgcactc

SEQ ID NO: 2111 - RNA, 21 nt, synthetic construct
  source 1..21: mol_type = other RNA; note = RTT (TGA-to-TGT PAM silencing edit)
caaattctgcaatccacactc

SEQ ID NO: 2112 - RNA, 21 nt, synthetic construct
  source 1..21: mol_type = other RNA; note = RTT (TGA-to-TGG PAM silencing edit)
caaattctgcaatccccactc

SEQ ID NO: 2113 - RNA, 21 nt, synthetic construct
  source 1..21: mol_type = other RNA; note = RTT (TGA-to-TGC PAM silencing edit)
caaattctgcaatccgcactc

SEQ ID NO: 2114 - RNA, 21 nt, synthetic construct
  source 1..21: mol_type = other RNA; note = PEgRNA spacer (TG;TGG;TGGG PAM)
caaattctgcaatcctcactc

SEQ ID NO: 2115 - RNA, 22 nt, synthetic construct
  source 1..22: mol_type = other RNA; note = RTT (TGA-to-TGT PAM silencing edit)
acaaattctgcaatccacactc

SEQ ID NO: 2116 - RNA, 22 nt, synthetic construct
  source 1..22: mol_type = other RNA; note = RTT (TGA-to-TGG PAM silencing edit)
acaaattctgcaatccccactc

SEQ ID NO: 2117 - RNA, 22 nt, synthetic construct
  source 1..22: mol_type = other RNA; note = RTT (TGA-to-TGC PAM silencing edit)
acaaattctgcaatccgcactc

SEQ ID NO: 2118 - RNA, 22 nt, synthetic construct
  source 1..22: mol_type = other RNA; note = PEgRNA spacer (TG;TGG;TGGG PAM)
acaaattctgcaatcctcactc

SEQ ID NO: 2119 - RNA, 23 nt, synthetic construct
  source 1..23: mol_type = other RNA; note = RTT (TGA-to-TGT PAM silencing edit)
aacaaattctgcaatccacactc

SEQ ID NO: 2120 - RNA, 23 nt, synthetic construct
  source 1..23: mol_type = other RNA; note = RTT (TGA-to-TGG PAM silencing edit)
aacaaattctgcaatccccactc

SEQ ID NO: 2121 - RNA, 23 nt, synthetic construct
  source 1..23: mol_type = other RNA; note = RTT (TGA-to-TGC PAM silencing edit)
aacaaattctgcaatccgcactc

SEQ ID NO: 2122 - RNA, 23 nt, synthetic construct
  source 1..23: mol_type = other RNA; note = RTT*1,2,3
aacaaattctgcaatcctcactc

SEQ ID NO: 2123 - RNA, 24 nt, synthetic construct
  source 1..24: mol_type = other RNA; note = RTT (TGA-to-TGT PAM silencing edit)
gaacaaattctgcaatccacactc

SEQ ID NO: 2124 - RNA, 24 nt, synthetic construct
  source 1..24: mol_type = other RNA; note = RTT (TGA-to-TGG PAM silencing edit)
gaacaaattctgcaatccccactc

SEQ ID NO: 2125 - RNA, 24 nt, synthetic construct
  source 1..24: mol_type = other RNA; note = RTT (TGA-to-TGC PAM silencing edit)
gaacaaattctgcaatccgcactc

SEQ ID NO: 2126 - RNA, 24 nt, synthetic construct
  source 1..24: mol_type = other RNA; note = RTT*1,2,3
gaacaaattctgcaatcctcactc

SEQ ID NO: 2127 - RNA, 25 nt, synthetic construct
  source 1..25: mol_type = other RNA; note = RTT (TGA-to-TGT PAM silencing edit)
tgaacaaattctgcaatccacactc

SEQ ID NO: 2128 - RNA, 25 nt, synthetic construct
  source 1..25: mol_type = other RNA; note = RTT (TGA-to-TGG PAM silencing edit)
tgaacaaattctgcaatccccactc

SEQ ID NO: 2129 - RNA, 25 nt, synthetic construct
  source 1..25: mol_type = other RNA; note = RTT (TGA-to-TGC PAM silencing edit)
tgaacaaattctgcaatccgcactc

SEQ ID NO: 2130 - RNA, 25 nt, synthetic construct
  source 1..25: mol_type = other RNA; note = RTT*1,2,3
tgaacaaattctgcaatcctcactc

SEQ ID NO: 2131 - RNA, 26 nt, synthetic construct
  source 1..26: mol_type = other RNA; note = RTT (TGA-to-TGT PAM silencing edit)
gtgaacaaattctgcaatccacactc

SEQ ID NO: 2132 - RNA, 26 nt, synthetic construct
  source 1..26: mol_type = other RNA; note = RTT (TGA-to-TGG PAM silencing edit)
gtgaacaaattctgcaatccccactc

SEQ ID NO: 2133 - RNA, 26 nt, synthetic construct
  source 1..26: mol_type = other RNA; note = RTT (TGA-to-TGC PAM silencing edit)
gtgaacaaattctgcaatccgcactc

SEQ ID NO: 2134 - RNA, 26 nt, synthetic construct
  source 1..26: mol_type = other RNA; note = RTT*1,2,3
gtgaacaaattctgcaatcctcactc

SEQ ID NO: 2135 - RNA, 27 nt, synthetic construct
  source 1..27: mol_type = other RNA; note = RTT (TGA-to-TGT PAM silencing edit)
agtgaacaaattctgcaatccacactc

SEQ ID NO: 2136 - RNA, 27 nt, synthetic construct
  source 1..27: mol_type = other RNA; note = RTT (TGA-to-TGG PAM silencing edit)
agtgaacaaattctgcaatccccactc

SEQ ID NO: 2137 - RNA, 27 nt, synthetic construct
  source 1..27: mol_type = other RNA; note = RTT (TGA-to-TGC PAM silencing edit)
agtgaacaaattctgcaatccgcactc

SEQ ID NO: 2138 - RNA, 27 nt, synthetic construct
  source 1..27: mol_type = other RNA; note = RTT*1,2,3
agtgaacaaattctgcaatcctcactc

SEQ ID NO: 2139 - RNA, 28 nt, synthetic construct
  source 1..28: mol_type = other RNA; note = RTT (TGA-to-TGT PAM silencing edit)
cagtgaacaaattctgcaatccacactc

SEQ ID NO: 2140 - RNA, 28 nt, synthetic construct
  source 1..28: mol_type = other RNA; note = RTT (TGA-to-TGG PAM silencing edit)
cagtgaacaaattctgcaatccccactc

SEQ ID NO: 2141 - RNA, 28 nt, synthetic construct
  source 1..28: mol_type = other RNA; note = RTT (TGA-to-TGC PAM silencing edit)
cagtgaacaaattctgcaatccgcactc

SEQ ID NO: 2142 - RNA, 28 nt, synthetic construct
  source 1..28: mol_type = other RNA; note = RTT*1,2,3
cagtgaacaaattctgcaatcctcactc

SEQ ID NO: 2143 - RNA, 29 nt, synthetic construct
  source 1..29: mol_type = other RNA; note = RTT (TGA-to-TGT PAM silencing edit)
tcagtgaacaaattctgcaatccacactc

SEQ ID NO: 2144 - RNA, 29 nt, synthetic construct
  source 1..29: mol_type = other RNA; note = RTT (TGA-to-TGG PAM silencing edit)
tcagtgaacaaattctgcaatccccactc

SEQ ID NO: 2145 - RNA, 29 nt, synthetic construct
  source 1..29: mol_type = other RNA; note = RTT (TGA-to-TGC PAM silencing edit)
tcagtgaacaaattctgcaatccgcactc

SEQ ID NO: 2146 - RNA, 29 nt, synthetic construct
  source 1..29: mol_type = other RNA; note = RTT*1,2,3
tcagtgaacaaattctgcaatcctcactc

SEQ ID NO: 2147 - RNA, 30 nt, synthetic construct
  source 1..30: mol_type = other RNA; note = RTT (TGA-to-TGT PAM silencing edit)
ctcagtgaacaaattctgcaatccacactc

SEQ ID NO: 2148 - RNA, 30 nt, synthetic construct
  source 1..30: mol_type = other RNA; note = RTT (TGA-to-TGG PAM silencing edit)
ctcagtgaacaaattctgcaatccccactc

SEQ ID NO: 2149 - RNA, 30 nt, synthetic construct
  source 1..30: mol_type = other RNA; note = RTT (TGA-to-TGC PAM silencing edit)
ctcagtgaacaaattctgcaatccgcactc

SEQ ID NO: 2150 - RNA, 30 nt, synthetic construct
  source 1..30: mol_type = other RNA; note = RTT*1,2,3
ctcagtgaacaaattctgcaatcctcactc

SEQ ID NO: 2151 - RNA, 31 nt, synthetic construct
  source 1..31: mol_type = other RNA; note = RTT (TGA-to-TGT PAM silencing edit)
gctcagtgaacaaattctgcaatccacactc

SEQ ID NO: 2152 - RNA, 31 nt, synthetic construct
  source 1..31: mol_type = other RNA; note = RTT (TGA-to-TGG PAM silencing edit)
gctcagtgaacaaattctgcaatccccactc

SEQ ID NO: 2153 - RNA, 31 nt, synthetic construct
  source 1..31: mol_type = other RNA; note = RTT (TGA-to-TGC PAM silencing edit)
gctcagtgaacaaattctgcaatccgcactc

SEQ ID NO: 2154 - RNA, 31 nt, synthetic construct
  source 1..31: mol_type = other RNA; note = RTT*1,2,3
gctcagtgaacaaattctgcaatcctcactc

SEQ ID NO: 2155 - RNA, 32 nt, synthetic construct
  source 1..32: mol_type = other RNA; note = RTT (TGA-to-TGT PAM silencing edit)
ggctcagtgaacaaattctgcaatccacactc

SEQ ID NO: 2156 - RNA, 32 nt, synthetic construct
  source 1..32: mol_type = other RNA; note = RTT (TGA-to-TGG PAM silencing edit)
ggctcagtgaacaaattctgcaatccccactc

SEQ ID NO: 2157 - RNA, 32 nt, synthetic construct
  source 1..32: mol_type = other RNA; note = RTT (TGA-to-TGC PAM silencing edit)
ggctcagtgaacaaattctgcaatccgcactc

SEQ ID NO: 2158 - RNA, 32 nt, synthetic construct
  source 1..32: mol_type = other RNA; note = RTT*1,2,3
ggctcagtgaacaaattctgcaatcctcactc

SEQ ID NO: 2159 - RNA, 33 nt, synthetic construct
  source 1..33: mol_type = other RNA; note = RTT (TGA-to-TGT PAM silencing edit)
tggctcagtgaacaaattctgcaatccacactc

SEQ ID NO: 2160 - RNA, 33 nt, synthetic construct
  source 1..33: mol_type = other RNA; note = RTT (TGA-to-TGG PAM silencing edit)
tggctcagtgaacaaattctgcaatccccactc

SEQ ID NO: 2161 - RNA, 33 nt, synthetic construct
  source 1..33: mol_type = other RNA; note = RTT (TGA-to-TGC PAM silencing edit)
tggctcagtgaacaaattctgcaatccgcactc

SEQ ID NO: 2162 - RNA, 33 nt, synthetic construct
  source 1..33: mol_type = other RNA; note = RTT*1,2,3
tggctcagtgaacaaattctgcaatcctcactc

SEQ ID NO: 2163 - RNA, 34 nt, synthetic construct
  source 1..34: mol_type = other RNA; note = RTT (TGA-to-TGT PAM silencing edit)
atggctcagtgaacaaattctgcaatccacactc

SEQ ID NO: 2164 - RNA, 34 nt, synthetic construct
  source 1..34: mol_type = other RNA; note = RTT (TGA-to-TGG PAM silencing edit)
atggctcagtgaacaaattctgcaatccccactc

SEQ ID NO: 2165 - RNA, 34 nt, synthetic construct
  source 1..34: mol_type = other RNA; note = RTT (TGA-to-TGC PAM silencing edit)
atggctcagtgaacaaattctgcaatccgcactc

SEQ ID NO: 2166 - RNA, 34 nt, synthetic construct
  source 1..34: mol_type = other RNA; note = RTT*1,2,3
atggctcagtgaacaaattctgcaatcctcactc

SEQ ID NO: 2167 - RNA, 35 nt, synthetic construct
  source 1..35: mol_type = other RNA; note = RTT (TGA-to-TGT PAM silencing edit)
catggctcagtgaacaaattctgcaatccacactc

SEQ ID NO: 2168 - RNA, 35 nt, synthetic construct
  source 1..35: mol_type = other RNA; note = RTT (TGA-to-TGG PAM silencing edit)
catggctcagtgaacaaattctgcaatccccactc

SEQ ID NO: 2169 - RNA, 35 nt, synthetic construct
  source 1..35: mol_type = other RNA; note = RTT (TGA-to-TGC PAM silencing edit)
catggctcagtgaacaaattctgcaatccgcactc

SEQ ID NO: 2170 - RNA, 35 nt, synthetic construct
  source 1..35: mol_type = other RNA; note = RTT*1,2,3
catggctcagtgaacaaattctgcaatcctcactc

SEQ ID NO: 2171 - RNA, 36 nt, synthetic construct
  source 1..36: mol_type = other RNA; note = RTT (TGA-to-TGT PAM silencing edit)
ccatggctcagtgaacaaattctgcaatccacactc

SEQ ID NO: 2172 - RNA, 36 nt, synthetic construct
  source 1..36: mol_type = other RNA; note = RTT (TGA-to-TGG PAM silencing edit)
ccatggctcagtgaacaaattctgcaatccccactc

SEQ ID NO: 2173 - RNA, 36 nt, synthetic construct
  source 1..36: mol_type = other RNA; note = RTT (TGA-to-TGC PAM silencing edit)
ccatggctcagtgaacaaattctgcaatccgcactc

SEQ ID NO: 2174 - RNA, 36 nt, synthetic construct
  source 1..36: mol_type = other RNA; note = RTT*1,2,3
ccatggctcagtgaacaaattctgcaatcctcactc

SEQ ID NO: 2175 - RNA, 37 nt, synthetic construct
  source 1..37: mol_type = other RNA; note = RTT (TGA-to-TGT PAM silencing edit)
tccatggctcagtgaacaaattctgcaatccacactc

SEQ ID NO: 2176 - RNA, 37 nt, synthetic construct
  source 1..37: mol_type = other RNA; note = RTT (TGA-to-TGG PAM silencing edit)
tccatggctcagtgaacaaattctgcaatccccactc

SEQ ID NO: 2177 - RNA, 37 nt, synthetic construct
  source 1..37: mol_type = other RNA; note = RTT (TGA-to-TGC PAM silencing edit)
tccatggctcagtgaacaaattctgcaatccgcactc

SEQ ID NO: 2178 - RNA, 37 nt, synthetic construct
  source 1..37: mol_type = other RNA; note = RTT*1,2,3
tccatggctcagtgaacaaattctgcaatcctcactc

SEQ ID NO: 2179 - RNA, 38 nt, synthetic construct
  source 1..38: mol_type = other RNA; note = RTT (TGA-to-TGT PAM silencing edit)
ctccatggctcagtgaacaaattctgcaatccacactc

SEQ ID NO: 2180 - RNA, 38 nt, synthetic construct
  source 1..38: mol_type = other RNA; note = RTT (TGA-to-TGG PAM silencing edit)
ctccatggctcagtgaacaaattctgcaatccccactc

SEQ ID NO: 2181 - RNA, 38 nt, synthetic construct
  source 1..38: mol_type = other RNA; note = RTT (TGA-to-TGC PAM silencing edit)
ctccatggctcagtgaacaaattctgcaatccgcactc

SEQ ID NO: 2182 - RNA, 38 nt, synthetic construct
  source 1..38: mol_type = other RNA; note = RTT*1,2,3
ctccatggctcagtgaacaaattctgcaatcctcactc

SEQ ID NO: 2183 - RNA, 39 nt, synthetic construct
  source 1..39: mol_type = other RNA; note = RTT (TGA-to-TGT PAM silencing edit)
cctccatggctcagtgaacaaattctgcaatccacactc

SEQ ID NO: 2184 - RNA, 39 nt, synthetic construct
  source 1..39: mol_type = other RNA; note = RTT (TGA-to-TGG PAM silencing edit)
cctccatggctcagtgaacaaattctgcaatccccactc

SEQ ID NO: 2185 - RNA, 39 nt, synthetic construct
  source 1..39: mol_type = other RNA; note = RTT (TGA-to-TGC PAM silencing edit)
cctccatggctcagtgaacaaattctgcaatccgcactc

SEQ ID NO: 2186 - RNA, 39 nt, synthetic construct
  source 1..39: mol_type = other RNA; note = RTT*1,2,3
cctccatggctcagtgaacaaattctgcaatcctcactc

SEQ ID NO: 2187 - RNA, 40 nt, synthetic construct
  source 1..40: mol_type = other RNA; note = RTT (TGA-to-TGT PAM silencing edit)
acctccatggctcagtgaacaaattctgcaatccacactc

SEQ ID NO: 2188 - RNA, 40 nt, synthetic construct
  source 1..40: mol_type = other RNA; note = RTT (TGA-to-TGG PAM silencing edit)
acctccatggctcagtgaacaaattctgcaatccccactc

SEQ ID NO: 2189 - RNA, 40 nt, synthetic construct
  source 1..40: mol_type = other RNA; note = RTT (TGA-to-TGC PAM silencing edit)
acctccatggctcagtgaacaaattctgcaatccgcactc

SEQ ID NO: 2190 - RNA, 40 nt, synthetic construct
  source 1..40: mol_type = other RNA; note = RTT*1,2,3
acctccatggctcagtgaacaaattctgcaatcctcactc

SEQ ID NO: 2191 - RNA, 121 nt, synthetic construct
  source 1..121: mol_type = other RNA; note = pegRNA
tgcactcacactgcccagaggttttagagctagaaatagcaagttaaaataaggctagtccgttatcaacttgaaaaagtggcaccgagtcggtgcttctgcaatccacactctgggcagt

SEQ ID NO: 2192 - RNA, 121 nt, synthetic construct
  source 1..121: mol_type = other RNA; note = pegRNA
tgcactcacactgcccagaggttttagagctagaaatagcaagttaaaataaggctagtccgttatcaacttgaaaaagtggcaccgagtcggtgcttctgcaatccgcactctgggcagt

SEQ ID NO: 2193 - RNA, 121 nt, synthetic construct
  source 1..121: mol_type = other RNA; note = pegRNA
tgcactcacactgcccagaggttttagagctagaaatagcaagttaaaataaggctagtccgttatcaacttgaaaaagtggcaccgagtcggtgcttctgcaatcctcactctgggcagt

SEQ ID NO: 2194 - RNA, 122 nt, synthetic construct
  source 1..122: mol_type = other RNA; note = pegRNA
tgcactcacactgcccagaggttttagagctagaaatagcaagttaaaataaggctagtccgttatcaacttgaaaaagtggcaccgagtcggtgcattctgcaatccacactctgggcagt

SEQ ID NO: 2195 - RNA, 122 nt, synthetic construct
  source 1..122: mol_type = other RNA; note = pegRNA
tgcactcacactgcccagaggttttagagctagaaatagcaagttaaaataaggctagtccgttatcaacttgaaaaagtggcaccgagtcggtgcattctgcaatccgcactctgggcagt

SEQ ID NO: 2196 - RNA, 122 nt, synthetic construct
  source 1..122: mol_type = other RNA; note = pegRNA
tgcactcacactgcccagaggttttagagctagaaatagcaagttaaaataaggctagtccgttatcaacttgaaaaagtggcaccgagtcggtgcttctgcaatccacactctgggcagtg

SEQ ID NO: 2197 - RNA, 122 nt, synthetic construct
  source 1..122: mol_type = other RNA; note = pegRNA
tgcactcacactgcccagaggttttagagctagaaatagcaagttaaaataaggctagtccgttatcaacttgaaaaagtggcaccgagtcggtgcttctgcaatccgcactctgggcagtg

SEQ ID NO: 2198 - RNA, 123 nt, synthetic construct
  source 1..123: mol_type = other RNA; note = pegRNA
tgcactcacactgcccagaggttttagagctagaaatagcaagttaaaataaggctagtccgttatcaacttgaaaaagtggcaccgagtcggtgcaattctgcaatccacactctgggcagt

SEQ ID NO: 2199 - RNA, 123 nt, synthetic construct
  source 1..123: mol_type = other RNA; note = pegRNA
tgcactcacactgcccagaggttttagagctagaaatagcaagttaaaataaggctagtccgttatcaacttgaaaaagtggcaccgagtcggtgcaattctgcaatccgcactctgggcagt

SEQ ID NO: 2200 - RNA, 123 nt, synthetic construct
  source 1..123: mol_type = other RNA; note = pegRNA
tgcactcacactgcccagaggttttagagctagaaatagcaagttaaaataaggctagtccgttatcaacttgaaaaagtggcaccgagtcggtgcaattctgcaatcctcactctgggcagt

SEQ ID NO: 2201 - RNA, 123 nt, synthetic construct
  source 1..123: mol_type = other RNA; note = pegRNA
tgcactcacactgcccagaggttttagagctagaaatagcaagttaaaataaggctagtccgttatcaacttgaaaaagtggcaccgagtcggtgcattctgcaatccacactctgggcagtg

SEQ ID NO: 2202 - RNA, 123 nt, synthetic construct
  source 1..123: mol_type = other RNA; note = pegRNA
tgcactcacactgcccagaggttttagagctagaaatagcaagttaaaataaggctagtccgttatcaacttgaaaaagtggcaccgagtcggtgcattctgcaatccgcactctgggcagtg

SEQ ID NO: 2203 - RNA, 123 nt, synthetic construct
  source 1..123: mol_type = other RNA; note = pegRNA
tgcactcacactgcccagaggttttagagctagaaatagcaagttaaaataaggctagtccgttatcaacttgaaaaagtggcaccgagtcggtgcttctgcaatccacactctgggcagtgt

SEQ ID NO: 2204 - RNA, 123 nt, synthetic construct
  source 1..123: mol_type = other RNA; note = pegRNA
tgcactcacactgcccagaggttttagagctagaaatagcaagttaaaataaggctagtccgttatcaacttgaaaaagtggcaccgagtcggtgcttctgcaatccgcactctgggcagtgt

SEQ ID NO: 2205 - RNA, 123 nt, synthetic construct
  source 1..123: mol_type = other RNA; note = pegRNA
tgcactcacactgcccagaggttttagagctagaaatagcaagttaaaataaggctagtccgttatcaacttgaaaaagtggcaccgagtcggtgcttctgcaatcctcactctgggcagtgt

SEQ ID NO: 2206 - RNA, 124 nt, synthetic construct
  source 1..124: mol_type = other RNA; note = pegRNA
tgcactcacactgcccagaggttttagagctagaaatagcaagttaaaataaggctagtccgttatcaacttgaaaaagtggcaccgagtcggtgcaaattctgcaatccacactctgggcagt

SEQ ID NO: 2207 - RNA, 124 nt, synthetic construct
  source 1..124: mol_type = other RNA; note = pegRNA
tgcactcacactgcccagaggttttagagctagaaatagcaagttaaaataaggctagtccgttatcaacttgaaaaagtggcaccgagtcggtgcaaattctgcaatccgcactctgggcagt

SEQ ID NO: 2208 - RNA, 124 nt, synthetic construct
  source 1..124: mol_type = other RNA; note = pegRNA
tgcactcacactgcccagaggttttagagctagaaatagcaagttaaaataaggctagtccgttatcaacttgaaaaagtggcaccgagtcggtgcaattctgcaatccacactctgggcagtg

SEQ ID NO: 2209 - RNA, 124 nt, synthetic construct
  source 1..124: mol_type = other RNA; note = pegRNA
tgcactcacactgcccagaggttttagagctagaaatagcaagttaaaataaggctagtccgttatcaacttgaaaaagtggcaccgagtcggtgcaattctgcaatccgcactctgggcagtg

SEQ ID NO: 2210 - RNA, 124 nt, synthetic construct
  source 1..124: mol_type = other RNA; note = pegRNA
tgcactcacactgcccagaggttttagagctagaaatagcaagttaaaataaggctagtccgttatcaacttgaaaaagtggcaccgagtcggtgcattctgcaatccacactctgggcagtgt

SEQ ID NO: 2211 - RNA, 124 nt, synthetic construct
  source 1..124: mol_type = other RNA; note = pegRNA
tgcactcacactgcccagaggttttagagctagaaatagcaagttaaaataaggctagtccgttatcaacttgaaaaagtggcaccgagtcggtgcattctgcaatccgcactctgggcagtgt

SEQ ID NO: 2212 - RNA, 124 nt, synthetic construct
  source 1..124: mol_type = other RNA; note = pegRNA
tgcactcacactgcccagaggttttagagctagaaatagcaagttaaaataaggctagtccgttatcaacttgaaaaagtggcaccgagtcggtgcttctgcaatccacactctgggcagtgtg

SEQ ID NO: 2213 - RNA, 124 nt, synthetic construct
  source 1..124: mol_type = other RNA; note = pegRNA
tgcactcacactgcccagaggttttagagctagaaatagcaagttaaaataaggctagtccgttatcaacttgaaaaagtggcaccgagtcggtgcttctgcaatccgcactctgggcagtgtg

SEQ ID NO: 2214 - RNA, 125 nt, synthetic construct
  source 1..125: mol_type = other RNA; note = pegRNA
tgcactcacactgcccagaggttttagagctagaaatagcaagttaaaataaggctagtccgttatcaacttgaaaaagtggcaccgagtcggtgcaaattctgcaatccacactctgggcagtg

SEQ ID NO: 2215 - RNA, 125 nt, synthetic construct
  source 1..125: mol_type = other RNA; note = pegRNA
tgcactcacactgcccagaggttttagagctagaaatagcaagttaaaataaggctagtccgttatcaacttgaaaaagtggcaccgagtcggtgcaaattctgcaatccgcactctgggcagtg

SEQ ID NO: 2216 - RNA, 125 nt, synthetic construct
  source 1..125: mol_type = other RNA; note = pegRNA
tgcactcacactgcccagaggttttagagctagaaatagcaagttaaaataaggctagtccgttatcaacttgaaaaagtggcaccgagtcggtgcaattctgcaatccacactctgggcagtgt

SEQ ID NO: 2217 - RNA, 125 nt, synthetic construct
  source 1..125: mol_type = other RNA; note = pegRNA
tgcactcacactgcccagaggttttagagctagaaatagcaagttaaaataaggctagtccgttatcaacttgaaaaagtggcaccgagtcggtgcaattctgcaatccgcactctgggcagtgt

SEQ ID NO: 2218 - RNA, 125 nt, synthetic construct
  source 1..125: mol_type = other RNA; note = pegRNA
tgcactcacactgcccagaggttttagagctagaaatagcaagttaaaataaggctagtccgttatcaacttgaaaaagtggcaccgagtcggtgcaattctgcaatcctcactctgggcagtgt

SEQ ID NO: 2219 - RNA, 125 nt, synthetic construct
  source 1..125: mol_type = other RNA; note = pegRNA
tgcactcacactgcccagaggttttagagctagaaatagcaagttaaaataaggctagtccgttatcaacttgaaaaagtggcaccgagtcggtgcattctgcaatccacactctgggcagtgtg

SEQ ID NO: 2220 - RNA, 125 nt, synthetic construct
  source 1..125: mol_type = other RNA; note = pegRNA
tgcactcacactgcccagaggttttagagctagaaatagcaagttaaaataaggctagtccgttatcaacttgaaaaagtggcaccgagtcggtgcattctgcaatccgcactctgggcagtgtg

SEQ ID NO: 2221 - RNA, 125 nt, synthetic construct
  source 1..125: mol_type = other RNA; note = pegRNA
tgcactcacactgcccagaggttttagagctagaaatagcaagttaaaataaggctagtccgttatcaacttgaaaaagtggcaccgagtcggtgccaaattctgcaatccacactctgggcagt

SEQ ID NO: 2222 - RNA, 125 nt, synthetic construct
  source 1..125: mol_type = other RNA; note = pegRNA
tgcactcacactgcccagaggttttagagctagaaatagcaagttaaaataaggctagtccgttatcaacttgaaaaagtggcaccgagtcggtgccaaattctgcaatccgcactctgggcagt

SEQ ID NO: 2223 - RNA, 125 nt, synthetic construct
  source 1..125: mol_type = other RNA; note = pegRNA
tgcactcacactgcccagaggttttagagctagaaatagcaagttaaaataaggctagtccgttatcaacttgaaaaagtggcaccgagtcggtgcttctgcaatccacactctgggcagtgtga

SEQ ID NO: 2224 - RNA, 125 nt, synthetic construct
  source 1..125: mol_type = other RNA; note = pegRNA
tgcactcacactgcccagaggttttagagctagaaatagcaagttaaaataaggctagtccgttatcaacttgaaaaagtggcaccgagtcggtgcttctgcaatccacactctgggcagttttt

SEQ ID NO: 2225 - RNA, 125 nt, synthetic construct
  source 1..125: mol_type = other RNA; note = pegRNA
tgcactcacactgcccagaggttttagagctagaaatagcaagttaaaataaggctagtccgttatcaacttgaaaaagtggcaccgagtcggtgcttctgcaatccgcactctgggcagtgtga

SEQ ID NO: 2226 - RNA, 125 nt, synthetic construct
  source 1..125: mol_type = other RNA; note = pegRNA
tgcactcacactgcccagaggttttagagctagaaatagcaagttaaaataaggctagtccgttatcaacttgaaaaagtggcaccgagtcggtgcttctgcaatccgcactctgggcagttttt

SEQ ID NO: 2227 - RNA, 125 nt, synthetic construct
  source 1..125: mol_type = other RNA; note = pegRNA
tgcactcacactgcccagaggttttagagctagaaatagcaagttaaaataaggctagtccgttatcaacttgaaaaagtggcaccgagtcggtgcttctgcaatcctcactctgggcagtgtga

SEQ ID NO: 2228 - RNA, 125 nt, synthetic construct
  source 1..125: mol_type = other RNA; note = pegRNA
tgcactcacactgcccagaggttttagagctagaaatagcaagttaaaataaggctagtccgttatcaacttgaaaaagtggcaccgagtcggtgcttctgcaatcctcactctgggcagttttt

SEQ ID NO: 2229 - RNA, 126 nt, synthetic construct
  source 1..126: mol_type = other RNA; note = pegRNA
tgcactcacactgcccagaggttttagagctagaaatagcaagttaaaataaggctagtccgttatcaacttgaaaaagtggcaccgagtcggtgcaaattctgcaatccacactctgggcagtgt

SEQ ID NO: 2230 - RNA, 126 nt, synthetic construct
  source 1..126: mol_type = other RNA; note = pegRNA
tgcactcacactgcccagaggttttagagctagaaatagcaagttaaaataaggctagtccgttatcaacttgaaaaagtggcaccgagtcggtgcaaattctgcaatccgcactctgggcagtgt

SEQ ID NO: 2231 - RNA, 126 nt, synthetic construct
  source 1..126: mol_type = other RNA; note = pegRNA
tgcactcacactgcccagaggttttagagctagaaatagcaagttaaaataaggctagtccgttatcaacttgaaaaagtggcaccgagtcggtgcaattctgcaatccacactctgggcagtgtg

SEQ ID NO: 2232 - RNA, 126 nt, synthetic construct
  source 1..126: mol_type = other RNA; note = pegRNA
tgcactcacactgcccagaggttttagagctagaaatagcaagttaaaataaggctagtccgttatcaacttgaaaaagtggcaccgagtcggtgcaattctgcaatccgcactctgggcagtgtg

SEQ ID NO: 2233 - RNA, 126 nt, synthetic construct
  source 1..126: mol_type = other RNA; note = pegRNA
tgcactcacactgcccagaggttttagagctagaaatagcaagttaaaataaggctagtccgttatcaacttgaaaaagtggcaccgagtcggtgcacaaattctgcaatccacactctgggcagt

SEQ ID NO: 2234 - RNA, 126 nt, synthetic construct
  source 1..126: mol_type = other RNA; note = pegRNA
tgcactcacactgcccagaggttttagagctagaaatagcaagttaaaataaggctagtccgttatcaacttgaaaaagtggcaccgagtcggtgcacaaattctgcaatccgcactctgggcagt

SEQ ID NO: 2235 - RNA, 126 nt, synthetic construct
  source 1..126: mol_type = other RNA; note = pegRNA
tgcactcacactgcccagaggttttagagctagaaatagcaagttaaaataaggctagtccgttatcaacttgaaaaagtggcaccgagtcggtgcacaaattctgcaatcctcactctgggcagt

SEQ ID NO: 2236 - RNA, 126 nt, synthetic construct
  source 1..126: mol_type = other RNA; note = pegRNA
tgcactcacactgcccagaggttttagagctagaaatagcaagttaaaataaggctagtccgttatcaacttgaaaaagtggcaccgagtcggtgcattctgcaatccacactctgggcagtgtga

SEQ ID NO: 2237 - RNA, 126 nt, synthetic construct
  source 1..126: mol_type = other RNA; note = pegRNA
tgcactcacactgcccagaggttttagagctagaaatagcaagttaaaataaggctagtccgttatcaacttgaaaaagtggcaccgagtcggtgcattctgcaatccacactctgggcagttttt

SEQ ID NO: 2238 - RNA, 126 nt, synthetic construct
  source 1..126: mol_type = other RNA; note = pegRNA
tgcactcacactgcccagaggttttagagctagaaatagcaagttaaaataaggctagtccgttatcaacttgaaaaagtggcaccgagtcggtgcattctgcaatccgcactctgggcagtgtga

SEQ ID NO: 2239 - RNA, 126 nt, synthetic construct
  source 1..126: mol_type = other RNA; note = pegRNA
tgcactcacactgcccagaggttttagagctagaaatagcaagttaaaataaggctagtccgttatcaacttgaaaaagtggcaccgagtcggtgcattctgcaatccgcactctgggcagttttt

SEQ ID NO: 2240 - RNA, 126 nt, synthetic construct
  source 1..126: mol_type = other RNA; note = pegRNA
tgcactcacactgcccagaggttttagagctagaaatagcaagttaaaataaggctagtccgttatcaacttgaaaaagtggcaccgagtcggtgccaaattctgcaatccacactctgggcagtg

SEQ ID NO: 2241 - RNA, 126 nt, synthetic construct
  source 1..126: mol_type = other RNA; note = pegRNA
tgcactcacactgcccagaggttttagagctagaaatagcaagttaaaataaggctagtccgttatcaacttgaaaaagtggcaccgagtcggtgccaaattctgcaatccgcactctgggcagtg

SEQ ID NO: 2242 - RNA, 126 nt, synthetic construct
  source 1..126: mol_type = other RNA; note = pegRNA
tgcactcacactgcccagaggttttagagctagaaatagcaagttaaaataaggctagtccgttatcaacttgaaaaagtggcaccgagtcggtgcttctgcaatccacactctgggcagtgtgag

SEQ ID NO: 2243 - RNA, 126 nt, synthetic construct
  source 1..126: mol_type = other RNA; note = pegRNA
tgcactcacactgcccagaggttttagagctagaaatagcaagttaaaataaggctagtccgttatcaacttgaaaaagtggcaccgagtcggtgcttctgcaatccacactctgggcagtgtttt

SEQ ID NO: 2244 - RNA, 126 nt, synthetic construct
  source 1..126: mol_type = other RNA; note = pegRNA
tgcactcacactgcccagaggttttagagctagaaatagcaagttaaaataaggctagtccgttatcaacttgaaaaagtggcaccgagtcggtgcttctgcaatccgcactctgggcagtgtgag

SEQ ID NO: 2245 - RNA, 126 nt, synthetic construct
  source 1..126: mol_type = other RNA; note = pegRNA
tgcactcacactgcccagaggttttagagctagaaatagcaagttaaaataaggctagtccgttatcaacttgaaaaagtggcaccgagtcggtgcttctgcaatccgcactctgggcagtgtttt

SEQ ID NO: 2246 - RNA, 127 nt, synthetic construct
  source 1..127: mol_type = other RNA; note = pegRNA
tgcactcacactgcccagaggttttagagctagaaatagcaagttaaaataaggctagtccgttatcaacttgaaaaagtggcaccgagtcggtgcaaattctgcaatccacactctgggcagtgtg

SEQ ID NO: 2247 - RNA, 127 nt, synthetic construct
  source 1..127: mol_type = other RNA; note = pegRNA
tgcactcacactgcccagaggttttagagctagaaatagcaagttaaaataaggctagtccgttatcaacttgaaaaagtggcaccgagtcggtgcaaattctgcaatccgcactctgggcagtgtg

SEQ ID NO: 2248 - RNA, 127 nt, synthetic construct
  source 1..127: mol_type = other RNA; note = pegRNA
tgcactcacactgcccagaggttttagagctagaaatagcaagttaaaataaggctagtccgttatcaacttgaaaaagtggcaccgagtcggtgcaacaaattctgcaatccacactctgggcagt

SEQ ID NO: 2249 - RNA, 127 nt, synthetic construct
  source 1..127: mol_type = other RNA; note = pegRNA
tgcactcacactgcccagaggttttagagctagaaatagcaagttaaaataaggctagtccgttatcaacttgaaaaagtggcaccgagtcggtgcaacaaattctgcaatccgcactctgggcagt

SEQ ID NO: 2250 - RNA, 127 nt, synthetic construct
  source 1..127: mol_type = other RNA; note = pegRNA
tgcactcacactgcccagaggttttagagctagaaatagcaagttaaaataaggctagtccgttatcaacttgaaaaagtggcaccgagtcggtgcaacaaattctgcaatcctcactctgggcagt

SEQ ID NO: 2251 - RNA, 127 nt, synthetic construct
  source 1..127: mol_type = other RNA; note = pegRNA
tgcactcacactgcccagaggttttagagctagaaatagcaagttaaaataaggctagtccgttatcaacttgaaaaagtggcaccgagtcggtgcaattctgcaatccacactctgggcagtgtga

SEQ ID NO: 2252 - RNA, 127 nt, synthetic construct
  source 1..127: mol_type = other RNA; note = pegRNA
tgcactcacactgcccagaggttttagagctagaaatagcaagttaaaataaggctagtccgttatcaacttgaaaaagtggcaccgagtcggtgcaattctgcaatccacactctgggcagttttt

SEQ ID NO: 2253 - RNA, 127 nt, synthetic construct
  source 1..127: mol_type = other RNA; note = pegRNA
tgcactcacactgcccagaggttttagagctagaaatagcaagttaaaataaggctagtccgttatcaacttgaaaaagtggcaccgagtcggtgcaattctgcaatccgcactctgggcagtgtga

SEQ ID NO: 2254 - RNA, 127 nt, synthetic construct
  source 1..127: mol_type = other RNA; note = pegRNA
tgcactcacactgcccagaggttttagagctagaaatagcaagttaaaataaggctagtccgttatcaacttgaaaaagtggcaccgagtcggtgcaattctgcaatccgcactctgggcagttttt

SEQ ID NO: 2255 - RNA, 127 nt, synthetic construct
  source 1..127: mol_type = other RNA; note = pegRNA
tgcactcacactgcccagaggttttagagctagaaatagcaagttaaaataaggctagtccgttatcaacttgaaaaagtggcaccgagtcggtgcaattctgcaatcctcactctgggcagtgtga

SEQ ID NO: 2256 - RNA, 127 nt, synthetic construct
  source 1..127: mol_type = other RNA; note = pegRNA
tgcactcacactgcccagaggttttagagctagaaatagcaagttaaaataaggctagtccgttatcaacttgaaaaagtggcaccgagtcggtgcaattctgcaatcctcactctgggcagttttt

SEQ ID NO: 2257 - RNA, 127 nt, synthetic construct
  source 1..127: mol_type = other RNA; note = pegRNA
tgcactcacactgcccagaggttttagagctagaaatagcaagttaaaataaggctagtccgttatcaacttgaaaaagtggcaccgagtcggtgcacaaattctgcaatccacactctgggcagtg

SEQ ID NO: 2258 - RNA, 127 nt, synthetic construct
  source 1..127: mol_type = other RNA; note = pegRNA
tgcactcacactgcccagaggttttagagctagaaatagcaagttaaaataaggctagtccgttatcaacttgaaaaagtggcaccgagtcggtgcacaaattctgcaatccgcactctgggcagtg

SEQ ID NO: 2259 - RNA, 127 nt, synthetic construct
  source 1..127: mol_type = other RNA; note = pegRNA
tgcactcacactgcccagaggttttagagctagaaatagcaagttaaaataaggctagtccgttatcaacttgaaaaagtggcaccgagtcggtgcattctgcaatccacactctgggcagtgtgag

SEQ ID NO: 2260 - RNA, 127 nt, synthetic construct
  source 1..127: mol_type = other RNA; note = pegRNA
tgcactcacactgcccagaggttttagagctagaaatagcaagttaaaataaggctagtccgttatcaacttgaaaaagtggcaccgagtcggtgcattctgcaatccacactctgggcagtgtttt

SEQ ID NO: 2261 - RNA, 127 nt, synthetic construct
  source 1..127: mol_type = other RNA; note = pegRNA
tgcactcacactgcccagaggttttagagctagaaatagcaagttaaaataaggctagtccgttatcaacttgaaaaagtggcaccgagtcggtgcattctgcaatccgcactctgggcagtgtgag

SEQ ID NO: 2262 - RNA, 127 nt, synthetic construct
  source 1..127: mol_type = other RNA; note = pegRNA
tgcactcacactgcccagaggttttagagctagaaatagcaagttaaaataaggctagtccgttatcaacttgaaaaagtggcaccgagtcggtgcattctgcaatccgcactctgggcagtgtttt

SEQ ID NO: 2263 - RNA, 127 nt, synthetic construct
  source 1..127: mol_type = other RNA; note = pegRNA
tgcactcacactgcccagaggttttagagctagaaatagcaagttaaaataaggctagtccgttatcaacttgaaaaagtggcaccgagtcggtgccaaattctgcaatccacactctgggcagtgt

SEQ ID NO: 2264 - RNA, 127 nt, synthetic construct
  source 1..127: mol_type = other RNA; note = pegRNA
tgcactcacactgcccagaggttttagagctagaaatagcaagttaaaataaggctagtccgttatcaacttgaaaaagtggcaccgagtcggtgccaaattctgcaatccgcactctgggcagtgt

SEQ ID NO: 2265 - RNA, 127 nt, synthetic construct
  source 1..127: mol_type = other RNA; note = pegRNA
tgcactcacactgcccagaggttttagagctagaaatagcaagttaaaataaggctagtccgttatcaacttgaaaaagtggcaccgagtcggtgcttctgcaatccacactctgggcagtgtgagt

SEQ ID NO: 2266 - RNA, 127 nt, synthetic construct
  source 1..127: mol_type = other RNA; note = pegRNA
tgcactcacactgcccagaggttttagagctagaaatagcaagttaaaataaggctagtccgttatcaacttgaaaaagtggcaccgagtcggtgcttctgcaatccacactctgggcagtgttttt

SEQ ID NO: 2267 - RNA, 127 nt, synthetic construct
  source 1..127: mol_type = other RNA; note = pegRNA
tgcactcacactgcccagaggttttagagctagaaatagcaagttaaaataaggctagtccgttatcaacttgaaaaagtggcaccgagtcggtgcttctgcaatccgcactctgggcagtgtgagt

SEQ ID NO: 2268 - RNA, 127 nt, synthetic construct
  source 1..127: mol_type = other RNA; note = pegRNA
tgcactcacactgcccagaggttttagagctagaaatagcaagttaaaataaggctagtccgttatcaacttgaaaaagtggcaccgagtcggtgcttctgcaatccgcactctgggcagtgttttt

SEQ ID NO: 2269 - RNA, 127 nt, synthetic construct
  source 1..127: mol_type = other RNA; note = pegRNA
tgcactcacactgcccagaggttttagagctagaaatagcaagttaaaataaggctagtccgttatcaacttgaaaaagtggcaccgagtcggtgcttctgcaatcctcactctgggcagtgtgagt

SEQ ID NO: 2270 - RNA, 127 nt, synthetic construct
  source 1..127: mol_type = other RNA; note = pegRNA
tgcactcacactgcccagaggttttagagctagaaatagcaagttaaaataaggctagtccgttatcaacttgaaaaagtggcaccgagtcggtgcttctgcaatcctcactctgggcagtgttttt

SEQ ID NO: 2271 - RNA, 128 nt, synthetic construct
  source 1..128: mol_type = other RNA; note = pegRNA
tgcactcacactgcccagaggttttagagctagaaatagcaagttaaaataaggctagtccgttatcaacttgaaaaagtggcaccgagtcggtgcaaattctgcaatccacactctgggcagtgtga

SEQ ID NO: 2272 - RNA, 128 nt, synthetic construct
  source 1..128: mol_type = other RNA; note = pegRNA
tgcactcacactgcccagaggttttagagctagaaatagcaagttaaaataaggctagtccgttatcaacttgaaaaagtggcaccgagtcggtgcaaattctgcaatccacactctgggcagttttt

SEQ ID NO: 2273 - RNA, 128 nt, synthetic construct
  source 1..128: mol_type = other RNA; note = pegRNA
tgcactcacactgcccagaggttttagagctagaaatagcaagttaaaataaggctagtccgttatcaacttgaaaaagtggcaccgagtcggtgcaaattctgcaatccgcactctgggcagtgtga

SEQ ID NO: 2274 - RNA, 128 nt, synthetic construct
  source 1..128: mol_type = other RNA; note = pegRNA
tgcactcacactgcccagaggttttagagctagaaatagcaagttaaaataaggctagtccgttatcaacttgaaaaagtggcaccgagtcggtgcaaattctgcaatccgcactctgggcagttttt

SEQ ID NO: 2275 - RNA, 128 nt, synthetic construct
  source 1..128: mol_type = other RNA; note = pegRNA
tgcactcacactgcccagaggttttagagctagaaatagcaagttaaaataaggctagtccgttatcaacttgaaaaagtggcaccgagtcggtgcaacaaattctgcaatccacactctgggcagtg

SEQ ID NO: 2276 - RNA, 128 nt, synthetic construct
  source 1..128: mol_type = other RNA; note = pegRNA
tgcactcacactgcccagaggttttagagctagaaatagcaagttaaaataaggctagtccgttatcaacttgaaaaagtggcaccgagtcggtgcaacaaattctgcaatccgcactctgggcagtg

SEQ ID NO: 2277 - RNA, 128 nt, synthetic construct
  source 1..128: mol_type = other RNA; note = pegRNA
tgcactcacactgcccagaggttttagagctagaaatagcaagttaaaataaggctagtccgttatcaacttgaaaaagtggcaccgagtcggtgcaattctgcaatccacactctgggcagtgtgag

SEQ ID NO: 2278 - RNA, 128 nt, synthetic construct
  source 1..128: mol_type = other RNA; note = pegRNA
tgcactcacactgcccagaggttttagagctagaaatagcaagttaaaataaggctagtccgttatcaacttgaaaaagtggcaccgagtcggtgcaattctgcaatccacactctgggcagtgtttt

SEQ ID NO: 2279 - RNA, 128 nt, synthetic construct
  source 1..128: mol_type = other RNA; note = pegRNA
tgcactcacactgcccagaggttttagagctagaaatagcaagttaaaataaggctagtccgttatcaacttgaaaaagtggcaccgagtcggtgcaattctgcaatccgcactctgggcagtgtgag

SEQ ID NO: 2280 - RNA, 128 nt, synthetic construct
  source 1..128: mol_type = other RNA; note = pegRNA
tgcactcacactgcccagaggttttagagctagaaatagcaagttaaaataaggctagtccgttatcaacttgaaaaagtggcaccgagtcggtgcaattctgcaatccgcactctgggcagtgtttt

SEQ ID NO: 2281 - RNA, 128 nt, synthetic construct
  source 1..128: mol_type = other RNA; note = pegRNA
tgcactcacactgcccagaggttttagagctagaaatagcaagttaaaataaggctagtccgttatcaacttgaaaaagtggcaccgagtcggtgcacaaattctgcaatccacactctgggcagtgt

SEQ ID NO: 2282 - RNA, 128 nt, synthetic construct
  source 1..128: mol_type = other RNA; note = pegRNA
tgcactcacactgcccagaggttttagagctagaaatagcaagttaaaataaggctagtccgttatcaacttgaaaaagtggcaccgagtcggtgcacaaattctgcaatccgcactctgggcagtgt

SEQ ID NO: 2283 - RNA, 128 nt, synthetic construct
  source 1..128: mol_type = other RNA; note = pegRNA
tgcactcacactgcccagaggttttagagctagaaatagcaagttaaaataaggctagtccgttatcaacttgaaaaagtggcaccgagtcggtgcacaaattctgcaatcctcactctgggcagtgt

SEQ ID NO: 2284 - RNA, 128 nt, synthetic construct
  source 1..128: mol_type = other RNA; note = pegRNA
tgcactcacactgcccagaggttttagagctagaaatagcaagttaaaataaggctagtccgttatcaacttgaaaaagtggcaccgagtcggtgcattctgcaatccacactctgggcagtgtgagt

SEQ ID NO: 2285 - RNA, 128 nt, synthetic construct
  source 1..128: mol_type = other RNA; note = pegRNA
tgcactcacactgcccagaggttttagagctagaaatagcaagttaaaataaggctagtccgttatcaacttgaaaaagtggcaccgagtcggtgcattctgcaatccacactctgggcagtgttttt

SEQ ID NO: 2286 - RNA, 128 nt, synthetic construct
  source 1..128: mol_type = other RNA; note = pegRNA
tgcactcacactgcccagaggttttagagctagaaatagcaagttaaaataaggctagtccgttatcaacttgaaaaagtggcaccgagtcggtgcattctgcaatccgcactctgggcagtgtgagt

SEQ ID NO: 2287 - RNA, 128 nt, synthetic construct
  source 1..128: mol_type = other RNA; note = pegRNA
tgcactcacactgcccagaggttttagagctagaaatagcaagttaaaataaggctagtccgttatcaacttgaaaaagtggcaccgagtcggtgcattctgcaatccgcactctgggcagtgttttt

SEQ ID NO: 2288 - RNA, 128 nt, synthetic construct
  source 1..128: mol_type = other RNA; note = pegRNA
tgcactcacactgcccagaggttttagagctagaaatagcaagttaaaataaggctagtccgttatcaacttgaaaaagtggcaccgagtcggtgccaaattctgcaatccacactctgggcagtgtg

SEQ ID NO: 2289 - RNA, 128 nt, synthetic construct
  source 1..128: mol_type = other RNA; note = pegRNA
tgcactcacactgcccagaggttttagagctagaaatagcaagttaaaataaggctagtccgttatcaacttgaaaaagtggcaccgagtcggtgccaaattctgcaatccgcactctgggcagtgtg

SEQ ID NO: 2290 - RNA, 128 nt, synthetic construct
  source 1..128: mol_type = other RNA; note = pegRNA
tgcactcacactgcccagaggttttagagctagaaatagcaagttaaaataaggctagtccgttatcaacttgaaaaagtggcaccgagtcggtgcgaacaaattctgcaatccacactctgggcagt

SEQ ID NO: 2291 - RNA, 128 nt, synthetic construct
  source 1..128: mol_type = other RNA; note = pegRNA
tgcactcacactgcccagaggttttagagctagaaatagcaagttaaaataaggctagtccgttatcaacttgaaaaagtggcaccgagtcggtgcgaacaaattctgcaatccgcactctgggcagt

SEQ ID NO: 2292 - RNA, 128 nt, synthetic construct
  source 1..128: mol_type = other RNA; note = pegRNA
tgcactcacactgcccagaggttttagagctagaaatagcaagttaaaataaggctagtccgttatcaacttgaaaaagtggcaccgagtcggtgcttctgcaatccacactctgggcagtgtgagtg

SEQ ID NO: 2293 - RNA, 128 nt, synthetic construct
  source 1..128: mol_type = other RNA; note = pegRNA
tgcactcacactgcccagaggttttagagctagaaatagcaagttaaaataaggctagtccgttatcaacttgaaaaagtggcaccgagtcggtgcttctgcaatccacactctgggcagtgtgtttt

SEQ ID NO: 2294 - RNA, 128 nt, synthetic construct
  source 1..128: mol_type = other RNA; note = pegRNA
tgcactcacactgcccagaggttttagagctagaaatagcaagttaaaataaggctagtccgttatcaacttgaaaaagtggcaccgagtcggtgcttctgcaatccgcactctgggcagtgtgagtg

SEQ ID NO: 2295 - RNA, 128 nt, synthetic construct
  source 1..128: mol_type = other RNA; note = pegRNA
tgcactcacactgcccagaggttttagagctagaaatagcaagttaaaataaggctagtccgttatcaacttgaaaaagtggcaccgagtcggtgcttctgcaatccgcactctgggcagtgtgtttt

SEQ ID NO: 2296 - RNA, 129 nt, synthetic construct
  source 1..129: mol_type = other RNA; note = pegRNA
tgcactcacactgcccagaggttttagagctagaaatagcaagttaaaataaggctagtccgttatcaacttgaaaaagtggcaccgagtcggtgcaaattctgcaatccacactctgggcagtgtgag

SEQ ID NO: 2297 - RNA, 129 nt, synthetic construct
  source 1..129: mol_type = other RNA; note = pegRNA
tgcactcacactgcccagaggttttagagctagaaatagcaagttaaaataaggctagtccgttatcaacttgaaaaagtggcaccgagtcggtgcaaattctgcaatccacactctgggcagtgtttt

SEQ ID NO: 2298 - RNA, 129 nt, synthetic construct
  source 1..129: mol_type = other RNA; note = pegRNA
tgcactcacactgcccagaggttttagagctagaaatagcaagttaaaataaggctagtccgttatcaacttgaaaaagtggcaccgagtcggtgcaaattctgcaatccgcactctgggcagtgtgag

SEQ ID NO: 2299 - RNA, 129 nt, synthetic construct
  source 1..129: mol_type = other RNA; note = pegRNA
tgcactcacactgcccagaggttttagagctagaaatagcaagttaaaataaggctagtccgttatcaacttgaaaaagtggcaccgagtcggtgcaaattctgcaatccgcactctgggcagtgtttt

SEQ ID NO: 2300 - RNA, 129 nt, synthetic construct
  source 1..129: mol_type = other RNA; note = pegRNA
tgcactcacactgcccagaggttttagagctagaaatagcaagttaaaataaggctagtccgttatcaacttgaaaaagtggcaccgagtcggtgcaacaaattctgcaatccacactctgggcagtgt

SEQ ID NO: 2301 - RNA, 129 nt, synthetic construct
  source 1..129: mol_type = other RNA; note = pegRNA
tgcactcacactgcccagaggttttagagctagaaatagcaagttaaaataaggctagtccgttatcaacttgaaaaagtggcaccgagtcggtgcaacaaattctgcaatccgcactctgggcagtgt

SEQ ID NO: 2302 - RNA, 129 nt, synthetic construct
  source 1..129: mol_type = other RNA; note = pegRNA
tgcactcacactgcccagaggttttagagctagaaatagcaagttaaaataaggctagtccgttatcaacttgaaaaagtggcaccgagtcggtgcaacaaattctgcaatcctcactctgggcagtgt

SEQ ID NO: 2303 - RNA, 129 nt, synthetic construct
  source 1..129: mol_type = other RNA; note = pegRNA
tgcactcacactgcccagaggttttagagctagaaatagcaagttaaaataaggctagtccgttatcaacttgaaaaagtggcaccgagtcggtgcaattctgcaatccacactctgggcagtgtgagt

SEQ ID NO: 2304 - RNA, 129 nt, synthetic construct
  source 1..129: mol_type = other RNA; note = pegRNA
tgcactcacactgcccagaggttttagagctagaaatagcaagttaaaataaggctagtccgttatcaacttgaaaaagtggcaccgagtcggtgcaattctgcaatccacactctgggcagtgttttt

SEQ ID NO: 2305 - RNA, 129 nt, synthetic construct
  source 1..129: mol_type = other RNA; note = pegRNA
tgcactcacactgcccagaggttttagagctagaaatagcaagttaaaataaggctagtccgttatcaacttgaaaaagtggcaccgagtcggtgcaattctgcaatccgcactctgggcagtgtgagt

SEQ ID NO: 2306 - RNA, 129 nt, synthetic construct
  source 1..129: mol_type = other RNA; note = pegRNA
tgcactcacactgcccagaggttttagagctagaaatagcaagttaaaataaggctagtccgttatcaacttgaaaaagtggcaccgagtcggtgcaattctgcaatccgcactctgggcagtgttttt

SEQ ID NO: 2307 - RNA, 129 nt, synthetic construct
  source 1..129: mol_type = other RNA; note = pegRNA
tgcactcacactgcccagaggttttagagctagaaatagcaagttaaaataaggctagtccgttatcaacttgaaaaagtggcaccgagtcggtgcaattctgcaatcctcactctgggcagtgtgagt

SEQ ID NO: 2308 - RNA, 129 nt, synthetic construct
  source 1..129: mol_type = other RNA; note = pegRNA
tgcactcacactgcccagaggttttagagctagaaatagcaagttaaaataaggctagtccgttatcaacttgaaaaagtggcaccgagtcggtgcaattctgcaatcctcactctgggcagtgttttt

SEQ ID NO: 2309 - RNA, 129 nt, synthetic construct
  source 1..129: mol_type = other RNA; note = pegRNA
tgcactcacactgcccagaggttttagagctagaaatagcaagttaaaataaggctagtccgttatcaacttgaaaaagtggcaccgagtcggtgcacaaattctgcaatccacactctgggcagtgtg

SEQ ID NO: 2310 - RNA, 129 nt, synthetic construct
  source 1..129: mol_type = other RNA; note = pegRNA
tgcactcacactgcccagaggttttagagctagaaatagcaagttaaaataaggctagtccgttatcaacttgaaaaagtggcaccgagtcggtgcacaaattctgcaatccgcactctgggcagtgtg

SEQ ID NO: 2311 - RNA, 129 nt, synthetic construct
  source 1..129: mol_type = other RNA; note = pegRNA
tgcactcacactgcccagaggttttagagctagaaatagcaagttaaaataaggctagtccgttatcaacttgaaaaagtggcaccgagtcggtgcattctgcaatccacactctgggcagtgtgagtg

SEQ ID NO: 2312 - RNA, 129 nt, synthetic construct
  source 1..129: mol_type = other RNA; note = pegRNA
tgcactcacactgcccagaggttttagagctagaaatagcaagttaaaataaggctagtccgttatcaacttgaaaaagtggcaccgagtcggtgcattctgcaatccacactctgggcagtgtgtttt

SEQ ID NO: 2313 - RNA, 129 nt, synthetic construct
  source 1..129: mol_type = other RNA; note = pegRNA
tgcactcacactgcccagaggttttagagctagaaatagcaagttaaaataaggctagtccgttatcaacttgaaaaagtggcaccgagtcggtgcattctgcaatccgcactctgggcagtgtgagtg

SEQ ID NO: 2314 - RNA, 129 nt, synthetic construct
  source 1..129: mol_type = other RNA; note = pegRNA
tgcactcacactgcccagaggttttagagctagaaatagcaagttaaaataaggctagtccgttatcaacttgaaaaagtggcaccgagtcggtgcattctgcaatccgcactctgggcagtgtgtttt

SEQ ID NO: 2315 - RNA, 129 nt, synthetic construct
  source 1..129: mol_type = other RNA; note = pegRNA
tgcactcacactgcccagaggttttagagctagaaatagcaagttaaaataaggctagtccgttatcaacttgaaaaagtggcaccgagtcggtgccaaattctgcaatccacactctgggcagtgtga

SEQ ID NO: 2316 - RNA, 129 nt, synthetic construct
  source 1..129: mol_type = other RNA; note = pegRNA
tgcactcacactgcccagaggttttagagctagaaatagcaagttaaaataaggctagtccgttatcaacttgaaaaagtggcaccgagtcggtgccaaattctgcaatccacactctgggcagttttt

SEQ ID NO: 2317 - RNA, 129 nt, synthetic construct
  source 1..129: mol_type = other RNA; note = pegRNA
tgcactcacactgcccagaggttttagagctagaaatagcaagttaaaataaggctagtccgttatcaacttgaaaaagtggcaccgagtcggtgccaaattctgcaatccgcactctgggcagtgtga

SEQ ID NO: 2318 - RNA, 129 nt, synthetic construct
  source 1..129: mol_type = other RNA; note = pegRNA
tgcactcacactgcccagaggttttagagctagaaatagcaagttaaaataaggctagtccgttatcaacttgaaaaagtggcaccgagtcggtgccaaattctgcaatccgcactctgggcagttttt

SEQ ID NO: 2319 - RNA, 129 nt, synthetic construct
  source 1..129: mol_type = other RNA; note = pegRNA
tgcactcacactgcccagaggttttagagctagaaatagcaagttaaaataaggctagtccgttatcaacttgaaaaagtggcaccgagtcggtgcgaacaaattctgcaatccacactctgggcagtg

SEQ ID NO: 2320 - RNA, 129 nt, synthetic construct
  source 1..129: mol_type = other RNA; note = pegRNA
tgcactcacactgcccagaggttttagagctagaaatagcaagttaaaataaggctagtccgttatcaacttgaaaaagtggcaccgagtcggtgcgaacaaattctgcaatccgcactctgggcagtg

SEQ ID NO: 2321 - RNA, 129 nt, synthetic construct
  source 1..129: mol_type = other RNA; note = pegRNA
tgcactcacactgcccagaggttttagagctagaaatagcaagttaaaataaggctagtccgttatcaacttgaaaaagtggcaccgagtcggtgctgaacaaattctgcaatccacactctgggcagt

SEQ ID NO: 2322 - RNA, 129 nt, synthetic construct
  source 1..129: mol_type = other RNA; note = pegRNA
tgcactcacactgcccagaggttttagagctagaaatagcaagttaaaataaggctagtccgttatcaacttgaaaaagtggcaccgagtcggtgctgaacaaattctgcaatccgcactctgggcagt

SEQ ID NO: 2323 - RNA, 129 nt, synthetic construct
  source 1..129: mol_type = other RNA; note = pegRNA
tgcactcacactgcccagaggttttagagctagaaatagcaagttaaaataaggctagtccgttatcaacttgaaaaagtggcaccgagtcggtgcttctgcaatccacactctgggcagtgtgagtgc

SEQ ID NO: 2324 - RNA, 129 nt, synthetic construct
  source 1..129: mol_type = other RNA; note = pegRNA
tgcactcacactgcccagaggttttagagctagaaatagcaagttaaaataaggctagtccgttatcaacttgaaaaagtggcaccgagtcggtgcttctgcaatccacactctgggcagtgtgatttt

SEQ ID NO: 2325 - RNA, 129 nt, synthetic construct
  source 1..129: mol_type = other RNA; note = pegRNA
tgcactcacactgcccagaggttttagagctagaaatagcaagttaaaataaggctagtccgttatcaacttgaaaaagtggcaccgagtcggtgcttctgcaatccgcactctgggcagtgtgagtgc

SEQ ID NO: 2326 - RNA, 129 nt, synthetic construct
  source 1..129: mol_type = other RNA; note = pegRNA
tgcactcacactgcccagaggttttagagctagaaatagcaagttaaaataaggctagtccgttatcaacttgaaaaagtggcaccgagtcggtgcttctgcaatccgcactctgggcagtgtgatttt

SEQ ID NO: 2327 - RNA, 129 nt, synthetic construct
  source 1..129: mol_type = other RNA; note = pegRNA
tgcactcacactgcccagaggttttagagctagaaatagcaagttaaaataaggctagtccgttatcaacttgaaaaagtggcaccgagtcggtgcttctgcaatcctcactctgggcagtgtgatttt

SEQ ID NO: 2328 - RNA, 130 nt, synthetic construct
  source 1..130: mol_type = other RNA; note = pegRNA
tgcactcacactgcccagaggttttagagctagaaatagcaagttaaaataaggctagtccgttatcaacttgaaaaagtggcaccgagtcggtgcaaattctgcaatccacactctgggcagtgtgagt

SEQ ID NO: 2329 - RNA, 130 nt, synthetic construct
  source 1..130: mol_type = other RNA; note = pegRNA
tgcactcacactgcccagaggttttagagctagaaatagcaagttaaaataaggctagtccgttatcaacttgaaaaagtggcaccgagtcggtgcaaattctgcaatccacactctgggcagtgttttt

SEQ ID NO: 2330 - RNA, 130 nt, synthetic construct
  source 1..130: mol_type = other RNA; note = pegRNA
tgcactcacactgcccagaggttttagagctagaaatagcaagttaaaataaggctagtccgttatcaacttgaaaaagtggcaccgagtcggtgcaaattctgcaatccgcactctgggcagtgtgagt

SEQ ID NO: 2331 - RNA, 130 nt, synthetic construct
  source 1..130: mol_type = other RNA; note = pegRNA
tgcactcacactgcccagaggttttagagctagaaatagcaagttaaaataaggctagtccgttatcaacttgaaaaagtggcaccgagtcggtgcaaattctgcaatccgcactctgggcagtgttttt

SEQ ID NO: 2332 - RNA, 130 nt, synthetic construct
  source 1..130: mol_type = other RNA; note = pegRNA
tgcactcacactgcccagaggttttagagctagaaatagcaagttaaaataaggctagtccgttatcaacttgaaaaagtggcaccgagtcggtgcaacaaattctgcaatccacactctgggcagtgtg

SEQ ID NO: 2333 - RNA, 130 nt, synthetic construct
  source 1..130: mol_type = other RNA; note = pegRNA
tgcactcacactgcccagaggttttagagctagaaatagcaagttaaaataaggctagtccgttatcaacttgaaaaagtggcaccgagtcggtgcaacaaattctgcaatccgcactctgggcagtgtg

SEQ ID NO: 2334 - RNA, 130 nt, synthetic construct
  source 1..130: mol_type = other RNA; note = pegRNA
tgcactcacactgcccagaggttttagagctagaaatagcaagttaaaataaggctagtccgttatcaacttgaaaaagtggcaccgagtcggtgcaattctgcaatccacactctgggcagtgtgagtg

SEQ ID NO: 2335 - RNA, 130 nt, synthetic construct
  source 1..130: mol_type = other RNA; note = pegRNA
tgcactcacactgcccagaggttttagagctagaaatagcaagttaaaataaggctagtccgttatcaacttgaaaaagtggcaccgagtcggtgcaattctgcaatccacactctgggcagtgtgtttt

SEQ ID NO: 2336 - RNA, 130 nt, synthetic construct
  source 1..130: mol_type = other RNA; note = pegRNA
tgcactcacactgcccagaggttttagagctagaaatagcaagttaaaataaggctagtccgttatcaacttgaaaaagtggcaccgagtcggtgcaattctgcaatccgcactctgggcagtgtgagtg

SEQ ID NO: 2337 - RNA, 130 nt, synthetic construct
  source 1..130: mol_type = other RNA; note = pegRNA
tgcactcacactgcccagaggttttagagctagaaatagcaagttaaaataaggctagtccgttatcaacttgaaaaagtggcaccgagtcggtgcaattctgcaatccgcactctgggcagtgtgtttt

SEQ ID NO: 2338 - RNA, 130 nt, synthetic construct
  source 1..130: mol_type = other RNA; note = pegRNA
tgcactcacactgcccagaggttttagagctagaaatagcaagttaaaataaggctagtccgttatcaacttgaaaaagtggcaccgagtcggtgcacaaattctgcaatccacactctgggcagtgtga

SEQ ID NO: 2339 - RNA, 130 nt, synthetic construct
  source 1..130: mol_type = other RNA; note = pegRNA
tgcactcacactgcccagaggttttagagctagaaatagcaagttaaaataaggctagtccgttatcaacttgaaaaagtggcaccgagtcggtgcacaaattctgcaatccacactctgggcagttttt

SEQ ID NO: 2340 - RNA, 130 nt, synthetic construct
  source 1..130: mol_type = other RNA; note = pegRNA
tgcactcacactgcccagaggttttagagctagaaatagcaagttaaaataaggctagtccgttatcaacttgaaaaagtggcaccgagtcggtgcacaaattctgcaatccgcactctgggcagtgtga

SEQ ID NO: 2341 - RNA, 130 nt, synthetic construct
  source 1..130: mol_type = other RNA; note = pegRNA
tgcactcacactgcccagaggttttagagctagaaatagcaagttaaaataaggctagtccgttatcaacttgaaaaagtggcaccgagtcggtgcacaaattctgcaatccgcactctgggcagttttt

SEQ ID NO: 2342 - RNA, 130 nt, synthetic construct
  source 1..130: mol_type = other RNA; note = pegRNA
tgcactcacactgcccagaggttttagagctagaaatagcaagttaaaataaggctagtccgttatcaacttgaaaaagtggcaccgagtcggtgcacaaattctgcaatcctcactctgggcagtgtga

SEQ ID NO: 2343 - RNA, 130 nt, synthetic construct
  source 1..130: mol_type = other RNA; note = pegRNA
tgcactcacactgcccagaggttttagagctagaaatagcaagttaaaataaggctagtccgttatcaacttgaaaaagtggcaccgagtcggtgcacaaattctgcaatcctcactctgggcagttttt

SEQ ID NO: 2344 - RNA, 130 nt, synthetic construct
  source 1..130: mol_type = other RNA; note = pegRNA
tgcactcacactgcccagaggttttagagctagaaatagcaagttaaaataaggctagtccgttatcaacttgaaaaagtggcaccgagtcggtgcattctgcaatccacactctgggcagtgtgagtgc

SEQ ID NO: 2345 - RNA, 130 nt, synthetic construct
  source 1..130: mol_type = other RNA; note = pegRNA
tgcactcacactgcccagaggttttagagctagaaatagcaagttaaaataaggctagtccgttatcaacttgaaaaagtggcaccgagtcggtgcattctgcaatccacactctgggcagtgtgatttt

SEQ ID NO: 2346 - RNA, 130 nt, synthetic construct
  source 1..130: mol_type = other RNA; note = pegRNA
tgcactcacactgcccagaggttttagagctagaaatagcaagttaaaataaggctagtccgttatcaacttgaaaaagtggcaccgagtcggtgcattctgcaatccgcactctgggcagtgtgagtgc

SEQ ID NO: 2347 - RNA, 130 nt, synthetic construct
  source 1..130: mol_type = other RNA; note = pegRNA
tgcactcacactgcccagaggttttagagctagaaatagcaagttaaaataaggctagtccgttatcaacttgaaaaagtggcaccgagtcggtgcattctgcaatccgcactctgggcagtgtgatttt

SEQ ID NO: 2348 - RNA, 130 nt, synthetic construct
  source 1..130: mol_type = other RNA; note = pegRNA
tgcactcacactgcccagaggttttagagctagaaatagcaagttaaaataaggctagtccgttatcaacttgaaaaagtggcaccgagtcggtgccaaattctgcaatccacactctgggcagtgtgag

SEQ ID NO: 2349 - RNA, 130 nt, synthetic construct
  source 1..130: mol_type = other RNA; note = pegRNA
tgcactcacactgcccagaggttttagagctagaaatagcaagttaaaataaggctagtccgttatcaacttgaaaaagtggcaccgagtcggtgccaaattctgcaatccacactctgggcagtgtttt

SEQ ID NO: 2350 - RNA, 130 nt, synthetic construct
  source 1..130: mol_type = other RNA; note = pegRNA
tgcactcacactgcccagaggttttagagctagaaatagcaagttaaaataaggctagtccgttatcaacttgaaaaagtggcaccgagtcggtgccaaattctgcaatccgcactctgggcagtgtgag

SEQ ID NO: 2351 - RNA, 130 nt, synthetic construct
  source 1..130: mol_type = other RNA; note = pegRNA
tgcactcacactgcccagaggttttagagctagaaatagcaagttaaaataaggctagtccgttatcaacttgaaaaagtggcaccgagtcggtgccaaattctgcaatccgcactctgggcagtgtttt

SEQ ID NO: 2352 - RNA, 130 nt, synthetic construct
  source 1..130: mol_type = other RNA; note = pegRNA
tgcactcacactgcccagaggttttagagctagaaatagcaagttaaaataaggctagtccgttatcaacttgaaaaagtggcaccgagtcggtgcgaacaaattctgcaatccacactctgggcagtgt

SEQ ID NO: 2353 - RNA, 130 nt, synthetic construct
  source 1..130: mol_type = other RNA; note = pegRNA
tgcactcacactgcccagaggttttagagctagaaatagcaagttaaaataaggctagtccgttatcaacttgaaaaagtggcaccgagtcggtgcgaacaaattctgcaatccgcactctgggcagtgt

SEQ ID NO: 2354 - RNA, 130 nt, synthetic construct
  source 1..130: mol_type = other RNA; note = pegRNA
tgcactcacactgcccagaggttttagagctagaaatagcaagttaaaataaggctagtccgttatcaacttgaaaaagtggcaccgagtcggtgcgtgaacaaattctgcaatccacactctgggcagt

SEQ ID NO: 2355 - RNA, 130 nt, synthetic construct
  source 1..130: mol_type = other RNA; note = pegRNA
tgcactcacactgcccagaggttttagagctagaaatagcaagttaaaataaggctagtccgttatcaacttgaaaaagtggcaccgagtcggtgcgtgaacaaattctgcaatccgcactctgggcagt

SEQ ID NO: 2356 - RNA, 130 nt, synthetic construct
  source 1..130: mol_type = other RNA; note = pegRNA
tgcactcacactgcccagaggttttagagctagaaatagcaagttaaaataaggctagtccgttatcaacttgaaaaagtggcaccgagtcggtgctgaacaaattctgcaatccacactctgggcagtg

SEQ ID NO: 2357 - RNA, 130 nt, synthetic construct
  source 1..130: mol_type = other RNA; note = pegRNA
tgcactcacactgcccagaggttttagagctagaaatagcaagttaaaataaggctagtccgttatcaacttgaaaaagtggcaccgagtcggtgctgaacaaattctgcaatccgcactctgggcagtg

SEQ ID NO: 2358 - RNA, 130 nt, synthetic construct
  source 1..130: mol_type = other RNA; note = pegRNA
tgcactcacactgcccagaggttttagagctagaaatagcaagttaaaataaggctagtccgttatcaacttgaaaaagtggcaccgagtcggtgcttctgcaatccacactctgggcagtgtgagtttt

SEQ ID NO: 2359 - RNA, 130 nt, synthetic construct
  source 1..130: mol_type = other RNA; note = pegRNA
tgcactcacactgcccagaggttttagagctagaaatagcaagttaaaataaggctagtccgttatcaacttgaaaaagtggcaccgagtcggtgcttctgcaatccgcactctgggcagtgtgagtttt

SEQ ID NO: 2360 - RNA, 131 nt, synthetic construct
  source 1..131: mol_type = other RNA; note = pegRNA
tgcactcacactgcccagaggttttagagctagaaatagcaagttaaaataaggctagtccgttatcaacttgaaaaagtggcaccgagtcggtgcaaattctgcaatccacactctgggcagtgtgagtg

SEQ ID NO: 2361 - RNA, 131 nt, synthetic construct
  source 1..131: mol_type = other RNA; note = pegRNA
tgcactcacactgcccagaggttttagagctagaaatagcaagttaaaataaggctagtccgttatcaacttgaaaaagtggcaccgagtcggtgcaaattctgcaatccacactctgggcagtgtgtttt

SEQ ID NO: 2362 - RNA, 131 nt, synthetic construct
  source 1..131: mol_type = other RNA; note = pegRNA
tgcactcacactgcccagaggttttagagctagaaatagcaagttaaaataaggctagtccgttatcaacttgaaaaagtggcaccgagtcggtgcaaattctgcaatccgcactctgggcagtgtgagtg

SEQ ID NO: 2363 - RNA, 131 nt, synthetic construct
  source 1..131: mol_type = other RNA; note = pegRNA
tgcactcacactgcccagaggttttagagctagaaatagcaagttaaaataaggctagtccgttatcaacttgaaaaagtggcaccgagtcggtgcaaattctgcaatccgcactctgggcagtgtgtttt

SEQ ID NO: 2364 - RNA, 131 nt, synthetic construct
  source 1..131: mol_type = other RNA; note = pegRNA
tgcactcacactgcccagaggttttagagctagaaatagcaagttaaaataaggctagtccgttatcaacttgaaaaagtggcaccgagtcggtgcaacaaattctgcaatccacactctgggcagtgtga

SEQ ID NO: 2365 - RNA, 131 nt, synthetic construct
  source 1..131: mol_type = other RNA; note = pegRNA
tgcactcacactgcccagaggttttagagctagaaatagcaagttaaaataaggctagtccgttatcaacttgaaaaagtggcaccgagtcggtgcaacaaattctgcaatccacactctgggcagttttt

SEQ ID NO: 2366 - RNA, 131 nt, synthetic construct
  source 1..131: mol_type = other RNA; note = pegRNA
tgcactcacactgcccagaggttttagagctagaaatagcaagttaaaataaggctagtccgttatcaacttgaaaaagtggcaccgagtcggtgcaacaaattctgcaatccgcactctgggcagtgtga

SEQ ID NO: 2367 - RNA, 131 nt, synthetic construct
  source 1..131: mol_type = other RNA; note = pegRNA
tgcactcacactgcccagaggttttagagctagaaatagcaagttaaaataaggctagtccgttatcaacttgaaaaagtggcaccgagtcggtgcaacaaattctgcaatccgcactctgggcagttttt

SEQ ID NO: 2368 - RNA, 131 nt, synthetic construct
  source 1..131: mol_type = other RNA; note = pegRNA
tgcactcacactgcccagaggttttagagctagaaatagcaagttaaaataaggctagtccgttatcaacttgaaaaagtggcaccgagtcggtgcaacaaattctgcaatcctcactctgggcagtgtga

SEQ ID NO: 2369 - RNA, 131 nt, synthetic construct
  source 1..131: mol_type = other RNA; note = pegRNA
tgcactcacactgcccagaggttttagagctagaaatagcaagttaaaataaggctagtccgttatcaacttgaaaaagtggcaccgagtcggtgcaacaaattctgcaatcctcactctgggcagttttt

SEQ ID NO: 2370 - RNA, 131 nt, synthetic construct
  source 1..131: mol_type = other RNA; note = pegRNA
tgcactcacactgcccagaggttttagagctagaaatagcaagttaaaataaggctagtccgttatcaacttgaaaaagtggcaccgagtcggtgcaattctgcaatccacactctgggcagtgtgagtgc

SEQ ID NO: 2371 - RNA, 131 nt, synthetic construct
  source 1..131: mol_type = other RNA; note = pegRNA
tgcactcacactgcccagaggttttagagctagaaatagcaagttaaaataaggctagtccgttatcaacttgaaaaagtggcaccgagtcggtgcaattctgcaatccacactctgggcagtgtgatttt

SEQ ID NO: 2372 - RNA, 131 nt, synthetic construct
  source 1..131: mol_type = other RNA; note = pegRNA
tgcactcacactgcccagaggttttagagctagaaatagcaagttaaaataaggctagtccgttatcaacttgaaaaagtggcaccgagtcggtgcaattctgcaatccgcactctgggcagtgtgagtgc

SEQ ID NO: 2373 - RNA, 131 nt, synthetic construct
  source 1..131: mol_type = other RNA; note = pegRNA
tgcactcacactgcccagaggttttagagctagaaatagcaagttaaaataaggctagtccgttatcaacttgaaaaagtggcaccgagtcggtgcaattctgcaatccgcactctgggcagtgtgatttt

SEQ ID NO: 2374 - RNA, 131 nt, synthetic construct
  source 1..131: mol_type = other RNA; note = pegRNA
tgcactcacactgcccagaggttttagagctagaaatagcaagttaaaataaggctagtccgttatcaacttgaaaaagtggcaccgagtcggtgcaattctgcaatcctcactctgggcagtgtgatttt

SEQ ID NO: 2375 - RNA, 131 nt, synthetic construct
  source 1..131: mol_type = other RNA; note = pegRNA
tgcactcacactgcccagaggttttagagctagaaatagcaagttaaaataaggctagtccgttatcaacttgaaaaagtggcaccgagtcggtgcacaaattctgcaatccacactctgggcagtgtgag

SEQ ID NO: 2376 - RNA, 131 nt, synthetic construct
  source 1..131: mol_type = other RNA; note = pegRNA
tgcactcacactgcccagaggttttagagctagaaatagcaagttaaaataaggctagtccgttatcaacttgaaaaagtggcaccgagtcggtgcacaaattctgcaatccacactctgggcagtgtttt

SEQ ID NO: 2377 - RNA, 131 nt, synthetic construct
  source 1..131: mol_type = other RNA; note = pegRNA
tgcactcacactgcccagaggttttagagctagaaatagcaagttaaaataaggctagtccgttatcaacttgaaaaagtggcaccgagtcggtgcacaaattctgcaatccgcactctgggcagtgtgag

SEQ ID NO: 2378 - RNA, 131 nt, synthetic construct
  source 1..131: mol_type = other RNA; note = pegRNA
tgcactcacactgcccagaggttttagagctagaaatagcaagttaaaataaggctagtccgttatcaacttgaaaaagtggcaccgagtcggtgcacaaattctgcaatccgcactctgggcagtgtttt

SEQ ID NO: 2379 - RNA, 131 nt, synthetic construct
  source 1..131: mol_type = other RNA; note = pegRNA
tgcactcacactgcccagaggttttagagctagaaatagcaagttaaaataaggctagtccgttatcaacttgaaaaagtggcaccgagtcggtgcagtgaacaaattctgcaatccacactctgggcagt

SEQ ID NO: 2380 - RNA, 131 nt, synthetic construct
  source 1..131: mol_type = other RNA; note = pegRNA
tgcactcacactgcccagaggttttagagctagaaatagcaagttaaaataaggctagtccgttatcaacttgaaaaagtggcaccgagtcggtgcagtgaacaaattctgcaatccgcactctgggcagt

SEQ ID NO: 2381 - RNA, 131 nt, synthetic construct
  source 1..131: mol_type = other RNA; note = pegRNA
tgcactcacactgcccagaggttttagagctagaaatagcaagttaaaataaggctagtccgttatcaacttgaaaaagtggcaccgagtcggtgcattctgcaatccacactctgggcagtgtgagtttt

SEQ ID NO: 2382 - RNA, 131 nt, synthetic construct
  source 1..131: mol_type = other RNA; note = pegRNA
tgcactcacactgcccagaggttttagagctagaaatagcaagttaaaataaggctagtccgttatcaacttgaaaaagtggcaccgagtcggtgcattctgcaatccgcactctgggcagtgtgagtttt

SEQ ID NO: 2383 - RNA, 131 nt, synthetic construct
  source 1..131: mol_type = other RNA; note = pegRNA
tgcactcacactgcccagaggttttagagctagaaatagcaagttaaaataaggctagtccgttatcaacttgaaaaagtggcaccgagtcggtgccaaattctgcaatccacactctgggcagtgtgagt

SEQ ID NO: 2384 - RNA, 131 nt, synthetic construct
  source 1..131: mol_type = other RNA; note = pegRNA
tgcactcacactgcccagaggttttagagctagaaatagcaagttaaaataaggctagtccgttatcaacttgaaaaagtggcaccgagtcggtgccaaattctgcaatccacactctgggcagtgttttt

SEQ ID NO: 2385 - RNA, 131 nt, synthetic construct
  source 1..131: mol_type = other RNA; note = pegRNA
tgcactcacactgcccagaggttttagagctagaaatagcaagttaaaataaggctagtccgttatcaacttgaaaaagtggcaccgagtcggtgccaaattctgcaatccgcactctgggcagtgtgagt

SEQ ID NO: 2386 - RNA, 131 nt, synthetic construct
  source 1..131: mol_type = other RNA; note = pegRNA
tgcactcacactgcccagaggttttagagctagaaatagcaagttaaaataaggctagtccgttatcaacttgaaaaagtggcaccgagtcggtgccaaattctgcaatccgcactctgggcagtgttttt

SEQ ID NO: 2387 - RNA, 131 nt, synthetic construct
  source 1..131: mol_type = other RNA; note = pegRNA
tgcactcacactgcccagaggttttagagctagaaatagcaagttaaaataaggctagtccgttatcaacttgaaaaagtggcaccgagtcggtgcgaacaaattctgcaatccacactctgggcagtgtg

SEQ ID NO: 2388 - RNA, 131 nt, synthetic construct
  source 1..131: mol_type = other RNA; note = pegRNA
tgcactcacactgcccagaggttttagagctagaaatagcaagttaaaataaggctagtccgttatcaacttgaaaaagtggcaccgagtcggtgcgaacaaattctgcaatccgcactctgggcagtgtg

SEQ ID NO: 2389 - RNA, 131 nt, synthetic construct
  source 1..131: mol_type = other RNA; note = pegRNA
tgcactcacactgcccagaggttttagagctagaaatagcaagttaaaataaggctagtccgttatcaacttgaaaaagtggcaccgagtcggtgcgtgaacaaattctgcaatccacactctgggcagtg

SEQ ID NO: 2390 - RNA, 131 nt, synthetic construct
  source 1..131: mol_type = other RNA; note = pegRNA
tgcactcacactgcccagaggttttagagctagaaatagcaagttaaaataaggctagtccgttatcaacttgaaaaagtggcaccgagtcggtgcgtgaacaaattctgcaatccgcactctgggcagtg

SEQ ID NO: 2391 - RNA, 131 nt, synthetic construct
  source 1..131: mol_type = other RNA; note = pegRNA
tgcactcacactgcccagaggttttagagctagaaatagcaagttaaaataaggctagtccgttatcaacttgaaaaagtggcaccgagtcggtgctgaacaaattctgcaatccacactctgggcagtgt

SEQ ID NO: 2392 - RNA, 131 nt, synthetic construct
  source 1..131: mol_type = other RNA; note = pegRNA
tgcactcacactgcccagaggttttagagctagaaatagcaagttaaaataaggctagtccgttatcaacttgaaaaagtggcaccgagtcggtgctgaacaaattctgcaatccgcactctgggcagtgt

SEQ ID NO: 2393 - RNA, 131 nt, synthetic construct
  source 1..131: mol_type = other RNA; note = pegRNA
tgcactcacactgcccagaggttttagagctagaaatagcaagttaaaataaggctagtccgttatcaacttgaaaaagtggcaccgagtcggtgcttctgcaatccacactctgggcagtgtgagttttt

SEQ ID NO: 2394 - RNA, 131 nt, synthetic construct
  source 1..131: mol_type = other RNA; note = pegRNA
tgcactcacactgcccagaggttttagagctagaaatagcaagttaaaataaggctagtccgttatcaacttgaaaaagtggcaccgagtcggtgcttctgcaatccgcactctgggcagtgtgagttttt

SEQ ID NO: 2395 - RNA, 131 nt, synthetic construct
  source 1..131: mol_type = other RNA; note = pegRNA
tgcactcacactgcccagaggttttagagctagaaatagcaagttaaaataaggctagtccgttatcaacttgaaaaagtggcaccgagtcggtgcttctgcaatcctcactctgggcagtgtgagttttt

SEQ ID NO: 2396 - RNA, 132 nt, synthetic construct
  source 1..132: mol_type = other RNA; note = pegRNA
tgcactcacactgcccagaggttttagagctagaaatagcaagttaaaataaggctagtccgttatcaacttgaaaaagtggcaccgagtcggtgcaaattctgcaatccacactctgggcagtgtgagtgc

SEQ ID NO: 2397 - RNA, 132 nt, synthetic construct
  source 1..132: mol_type = other RNA; note = pegRNA
tgcactcacactgcccagaggttttagagctagaaatagcaagttaaaataaggctagtccgttatcaacttgaaaaagtggcaccgagtcggtgcaaattctgcaatccacactctgggcagtgtgatttt

SEQ ID NO: 2398 - RNA, 132 nt, synthetic construct
  source 1..132: mol_type = other RNA; note = pegRNA
tgcactcacactgcccagaggttttagagctagaaatagcaagttaaaataaggctagtccgttatcaacttgaaaaagtggcaccgagtcggtgcaaattctgcaatccgcactctgggcagtgtgagtgc

SEQ ID NO: 2399 - RNA, 132 nt, synthetic construct
  source 1..132: mol_type = other RNA; note = pegRNA
tgcactcacactgcccagaggttttagagctagaaatagcaagttaaaataaggctagtccgttatcaacttgaaaaagtggcaccgagtcggtgcaaattctgcaatccgcactctgggcagtgtgatttt

SEQ ID NO: 2400 - RNA, 132 nt, synthetic construct
  source 1..132: mol_type = other RNA; note = pegRNA
tgcactcacactgcccagaggttttagagctagaaatagcaagttaaaataaggctagtccgttatcaacttgaaaaagtggcaccgagtcggtgcaacaaattctgcaatccacactctgggcagtgtgag

SEQ ID NO: 2401 - RNA, 132 nt, synthetic construct
  source 1..132: mol_type = other RNA; note = pegRNA
tgcactcacactgcccagaggttttagagctagaaatagcaagttaaaataaggctagtccgttatcaacttgaaaaagtggcaccgagtcggtgcaacaaattctgcaatccacactctgggcagtgtttt

SEQ ID NO: 2402 - RNA, 132 nt, synthetic construct
  source 1..132: mol_type = other RNA; note = pegRNA
tgcactcacactgcccagaggttttagagctagaaatagcaagttaaaataaggctagtccgttatcaacttgaaaaagtggcaccgagtcggtgcaacaaattctgcaatccgcactctgggcagtgtgag

SEQ ID NO: 2403 - RNA, 132 nt, synthetic construct
  source 1..132: mol_type = other RNA; note = pegRNA
tgcactcacactgcccagaggttttagagctagaaatagcaagttaaaataaggctagtccgttatcaacttgaaaaagtggcaccgagtcggtgcaacaaattctgcaatccgcactctgggcagtgtttt

SEQ ID NO: 2404 - RNA, 132 nt, synthetic construct
  source 1..132: mol_type = other RNA; note = pegRNA
tgcactcacactgcccagaggttttagagctagaaatagcaagttaaaataaggctagtccgttatcaacttgaaaaagtggcaccgagtcggtgcaattctgcaatccacactctgggcagtgtgagtttt

SEQ ID NO: 2405 - RNA, 132 nt, synthetic construct
  source 1..132: mol_type = other RNA; note = pegRNA
tgcactcacactgcccagaggttttagagctagaaatagcaagttaaaataaggctagtccgttatcaacttgaaaaagtggcaccgagtcggtgcaattctgcaatccgcactctgggcagtgtgagtttt

SEQ ID NO: 2406 - RNA, 132 nt, synthetic construct
  source 1..132: mol_type = other RNA; note = pegRNA
tgcactcacactgcccagaggttttagagctagaaatagcaagttaaaataaggctagtccgttatcaacttgaaaaagtggcaccgagtcggtgcacaaattctgcaatccacactctgggcagtgtgagt

SEQ ID NO: 2407 - RNA, 132 nt, synthetic construct
  source 1..132: mol_type = other RNA; note = pegRNA
tgcactcacactgcccagaggttttagagctagaaatagcaagttaaaataaggctagtccgttatcaacttgaaaaagtggcaccgagtcggtgcacaaattctgcaatccacactctgggcagtgttttt

SEQ ID NO: 2408 - RNA, 132 nt, synthetic construct
  source 1..132: mol_type = other RNA; note = pegRNA
tgcactcacactgcccagaggttttagagctagaaatagcaagttaaaataaggctagtccgttatcaacttgaaaaagtggcaccgagtcggtgcacaaattctgcaatccgcactctgggcagtgtgagt

SEQ ID NO: 2409 - RNA, 132 nt, synthetic construct
  source 1..132: mol_type = other RNA; note = pegRNA
tgcactcacactgcccagaggttttagagctagaaatagcaagttaaaataaggctagtccgttatcaacttgaaaaagtggcaccgagtcggtgcacaaattctgcaatccgcactctgggcagtgttttt

SEQ ID NO: 2410 - RNA, 132 nt, synthetic construct
  source 1..132: mol_type = other RNA; note = pegRNA
tgcactcacactgcccagaggttttagagctagaaatagcaagttaaaataaggctagtccgttatcaacttgaaaaagtggcaccgagtcggtgcacaaattctgcaatcctcactctgggcagtgtgagt

SEQ ID NO: 2411 - RNA, 132 nt, synthetic construct
  source 1..132: mol_type = other RNA; note = pegRNA
tgcactcacactgcccagaggttttagagctagaaatagcaagttaaaataaggctagtccgttatcaacttgaaaaagtggcaccgagtcggtgcacaaattctgcaatcctcactctgggcagtgttttt

SEQ ID NO: 2412 - RNA, 132 nt, synthetic construct
  source 1..132: mol_type = other RNA; note = pegRNA
tgcactcacactgcccagaggttttagagctagaaatagcaagttaaaataaggctagtccgttatcaacttgaaaaagtggcaccgagtcggtgcagtgaacaaattctgcaatccacactctgggcagtg

SEQ ID NO: 2413 - RNA, 132 nt, synthetic construct
  source 1..132: mol_type = other RNA; note = pegRNA
tgcactcacactgcccagaggttttagagctagaaatagcaagttaaaataaggctagtccgttatcaacttgaaaaagtggcaccgagtcggtgcagtgaacaaattctgcaatccgcactctgggcagtg

SEQ ID NO: 2414 - RNA, 132 nt, synthetic construct
  source 1..132: mol_type = other RNA; note = pegRNA
tgcactcacactgcccagaggttttagagctagaaatagcaagttaaaataaggctagtccgttatcaacttgaaaaagtggcaccgagtcggtgcattctgcaatccacactctgggcagtgtgagttttt

SEQ ID NO: 2415 - RNA, 132 nt, synthetic construct
  source 1..132: mol_type = other RNA; note = pegRNA
tgcactcacactgcccagaggttttagagctagaaatagcaagttaaaataaggctagtccgttatcaacttgaaaaagtggcaccgagtcggtgcattctgcaatccgcactctgggcagtgtgagttttt

SEQ ID NO: 2416 - RNA, 132 nt, synthetic construct
  source 1..132: mol_type = other RNA; note = pegRNA
tgcactcacactgcccagaggttttagagctagaaatagcaagttaaaataaggctagtccgttatcaacttgaaaaagtggcaccgagtcggtgccaaattctgcaatccacactctgggcagtgtgagtg

SEQ ID NO: 2417 - RNA, 132 nt, synthetic construct
  source 1..132: mol_type = other RNA; note = pegRNA
tgcactcacactgcccagaggttttagagctagaaatagcaagttaaaataaggctagtccgttatcaacttgaaaaagtggcaccgagtcggtgccaaattctgcaatccacactctgggcagtgtgtttt

SEQ ID NO: 2418 - RNA, 132 nt, synthetic construct
  source 1..132: mol_type = other RNA; note = pegRNA
tgcactcacactgcccagaggttttagagctagaaatagcaagttaaaataaggctagtccgttatcaacttgaaaaagtggcaccgagtcggtgccaaattctgcaatccgcactctgggcagtgtgagtg

SEQ ID NO: 2419 - RNA, 132 nt, synthetic construct
  source 1..132: mol_type = other RNA; note = pegRNA
tgcactcacactgcccagaggttttagagctagaaatagcaagttaaaataaggctagtccgttatcaacttgaaaaagtggcaccgagtcggtgccaaattctgcaatccgcactctgggcagtgtgtttt

SEQ ID NO: 2420 - RNA, 132 nt, synthetic construct
  source 1..132: mol_type = other RNA; note = pegRNA
tgcactcacactgcccagaggttttagagctagaaatagcaagttaaaataaggctagtccgttatcaacttgaaaaagtggcaccgagtcggtgccagtgaacaaattctgcaatccacactctgggcagt

SEQ ID NO: 2421 - RNA, 132 nt, synthetic construct
  source 1..132: mol_type = other RNA; note = pegRNA
tgcactcacactgcccagaggttttagagctagaaatagcaagttaaaataaggctagtccgttatcaacttgaaaaagtggcaccgagtcggtgccagtgaacaaattctgcaatccgcactctgggcagt

SEQ ID NO: 2422 - RNA, 132 nt, synthetic construct
  source 1..132: mol_type = other RNA; note = pegRNA
tgcactcacactgcccagaggttttagagctagaaatagcaagttaaaataaggctagtccgttatcaacttgaaaaagtggcaccgagtcggtgcgaacaaattctgcaatccacactctgggcagtgtga

SEQ ID NO: 2423 - RNA, 132 nt, synthetic construct
  source 1..132: mol_type = other RNA; note = pegRNA
tgcactcacactgcccagaggttttagagctagaaatagcaagttaaaataaggctagtccgttatcaacttgaaaaagtggcaccgagtcggtgcgaacaaattctgcaatccacactctgggcagttttt

SEQ ID NO: 2424 - RNA, 132 nt, synthetic construct
  source 1..132: mol_type = other RNA; note = pegRNA
tgcactcacactgcccagaggttttagagctagaaatagcaagttaaaataaggctagtccgttatcaacttgaaaaagtggcaccgagtcggtgcgaacaaattctgcaatccgcactctgggcagtgtga

SEQ ID NO: 2425 - RNA, 132 nt, synthetic construct
  source 1..132: mol_type = other RNA; note = pegRNA
tgcactcacactgcccagaggttttagagctagaaatagcaagttaaaataaggctagtccgttatcaacttgaaaaagtggcaccgagtcggtgcgaacaaattctgcaatccgcactctgggcagttttt

SEQ ID NO: 2426 - RNA, 132 nt, synthetic construct
  source 1..132: mol_type = other RNA; note = pegRNA
tgcactcacactgcccagaggttttagagctagaaatagcaagttaaaataaggctagtccgttatcaacttgaaaaagtggcaccgagtcggtgcgtgaacaaattctgcaatccacactctgggcagtgt

SEQ ID NO: 2427 - RNA, 132 nt, synthetic construct
  source 1..132: mol_type = other RNA; note = pegRNA
tgcactcacactgcccagaggttttagagctagaaatagcaagttaaaataaggctagtccgttatcaacttgaaaaagtggcaccgagtcggtgcgtgaacaaattctgcaatccgcactctgggcagtgt

SEQ ID NO: 2428 - RNA, 132 nt, synthetic construct
  source 1..132: mol_type = other RNA; note = pegRNA
tgcactcacactgcccagaggttttagagctagaaatagcaagttaaaataaggctagtccgttatcaacttgaaaaagtggcaccgagtcggtgctgaacaaattctgcaatccacactctgggcagtgtg

SEQ ID NO: 2429 - RNA, 132 nt, synthetic construct
  source 1..132: mol_type = other RNA; note = pegRNA
tgcactcacactgcccagaggttttagagctagaaatagcaagttaaaataaggctagtccgttatcaacttgaaaaagtggcaccgagtcggtgctgaacaaattctgcaatccgcactctgggcagtgtg

SEQ ID NO: 2430 - RNA, 132 nt, synthetic construct
  source 1..132: mol_type = other RNA; note = pegRNA
tgcactcacactgcccagaggttttagagctagaaatagcaagttaaaataaggctagtccgttatcaacttgaaaaagtggcaccgagtcggtgcttctgcaatccacactctgggcagtgtgagtgtttt

SEQ ID NO: 2431 - RNA, 132 nt, synthetic construct
  source 1..132: mol_type = other RNA; note = pegRNA
tgcactcacactgcccagaggttttagagctagaaatagcaagttaaaataaggctagtccgttatcaacttgaaaaagtggcaccgagtcggtgcttctgcaatccgcactctgggcagtgtgagtgtttt

SEQ ID NO: 2432 - RNA, 133 nt, synthetic construct
  source 1..133: mol_type = other RNA; note = pegRNA
tgcactcacactgcccagaggttttagagctagaaatagcaagttaaaataaggctagtccgttatcaacttgaaaaagtggcaccgagtcggtgcaaattctgcaatccacactctgggcagtgtgagtttt

SEQ ID NO: 2433 - RNA, 133 nt, synthetic construct
  source 1..133: mol_type = other RNA; note = pegRNA
tgcactcacactgcccagaggttttagagctagaaatagcaagttaaaataaggctagtccgttatcaacttgaaaaagtggcaccgagtcggtgcaaattctgcaatccgcactctgggcagtgtgagtttt

SEQ ID NO: 2434 - RNA, 133 nt, synthetic construct
  source 1..133: mol_type = other RNA; note = pegRNA
tgcactcacactgcccagaggttttagagctagaaatagcaagttaaaataaggctagtccgttatcaacttgaaaaagtggcaccgagtcggtgcaacaaattctgcaatccacactctgggcagtgtgagt

SEQ ID NO: 2435 - RNA, 133 nt, synthetic construct
  source 1..133: mol_type = other RNA; note = pegRNA
tgcactcacactgcccagaggttttagagctagaaatagcaagttaaaataaggctagtccgttatcaacttgaaaaagtggcaccgagtcggtgcaacaaattctgcaatccacactctgggcagtgttttt

SEQ ID NO: 2436 - RNA, 133 nt, synthetic construct
  source 1..133: mol_type = other RNA; note = pegRNA
tgcactcacactgcccagaggttttagagctagaaatagcaagttaaaataaggctagtccgttatcaacttgaaaaagtggcaccgagtcggtgcaacaaattctgcaatccgcactctgggcagtgtgagt

SEQ ID NO: 2437 - RNA, 133 nt, synthetic construct
  source 1..133: mol_type = other RNA; note = pegRNA
tgcactcacactgcccagaggttttagagctagaaatagcaagttaaaataaggctagtccgttatcaacttgaaaaagtggcaccgagtcggtgcaacaaattctgcaatccgcactctgggcagtgttttt

SEQ ID NO: 2438 - RNA, 133 nt, synthetic construct
  source 1..133: mol_type = other RNA; note = pegRNA
tgcactcacactgcccagaggttttagagctagaaatagcaagttaaaataaggctagtccgttatcaacttgaaaaagtggcaccgagtcggtgcaacaaattctgcaatcctcactctgggcagtgtgagt

SEQ ID NO: 2439 - RNA, 133 nt, synthetic construct
  source 1..133: mol_type = other RNA; note = pegRNA
tgcactcacactgcccagaggttttagagctagaaatagcaagttaaaataaggctagtccgttatcaacttgaaaaagtggcaccgagtcggtgcaacaaattctgcaatcctcactctgggcagtgttttt

SEQ ID NO: 2440 - RNA, 133 nt, synthetic construct
  source 1..133: mol_type = other RNA; note = pegRNA
tgcactcacactgcccagaggttttagagctagaaatagcaagttaaaataaggctagtccgttatcaacttgaaaaagtggcaccgagtcggtgcaattctgcaatccacactctgggcagtgtgagttttt

SEQ ID NO: 2441 - RNA, 133 nt, synthetic construct
  source 1..133: mol_type = other RNA; note = pegRNA
tgcactcacactgcccagaggttttagagctagaaatagcaagttaaaataaggctagtccgttatcaacttgaaaaagtggcaccgagtcggtgcaattctgcaatccgcactctgggcagtgtgagttttt

SEQ ID NO: 2442 - RNA, 133 nt, synthetic construct
  source 1..133: mol_type = other RNA; note = pegRNA
tgcactcacactgcccagaggttttagagctagaaatagcaagttaaaataaggctagtccgttatcaacttgaaaaagtggcaccgagtcggtgcaattctgcaatcctcactctgggcagtgtgagttttt

SEQ ID NO: 2443 - RNA, 133 nt, synthetic construct
  source 1..133: mol_type = other RNA; note = pegRNA
tgcactcacactgcccagaggttttagagctagaaatagcaagttaaaataaggctagtccgttatcaacttgaaaaagtggcaccgagtcggtgcacaaattctgcaatccacactctgggcagtgtgagtg

SEQ ID NO: 2444 - RNA, 133 nt, synthetic construct
  source 1..133: mol_type = other RNA; note = pegRNA
tgcactcacactgcccagaggttttagagctagaaatagcaagttaaaataaggctagtccgttatcaacttgaaaaagtggcaccgagtcggtgcacaaattctgcaatccacactctgggcagtgtgtttt

SEQ ID NO: 2445 - RNA, 133 nt, synthetic construct
  source 1..133: mol_type = other RNA; note = pegRNA
tgcactcacactgcccagaggttttagagctagaaatagcaagttaaaataaggctagtccgttatcaacttgaaaaagtggcaccgagtcggtgcacaaattctgcaatccgcactctgggcagtgtgagtg

SEQ ID NO: 2446 - RNA, 133 nt, synthetic construct
  source 1..133: mol_type = other RNA; note = pegRNA
tgcactcacactgcccagaggttttagagctagaaatagcaagttaaaataaggctagtccgttatcaacttgaaaaagtggcaccgagtcggtgcacaaattctgcaatccgcactctgggcagtgtgtttt

SEQ ID NO: 2447 - RNA, 133 nt, synthetic construct
  source 1..133: mol_type = other RNA; note = pegRNA
tgcactcacactgcccagaggttttagagctagaaatagcaagttaaaataaggctagtccgttatcaacttgaaaaagtggcaccgagtcggtgcagtgaacaaattctgcaatccacactctgggcagtgt

SEQ ID NO: 2448 - RNA, 133 nt, synthetic construct
  source 1..133: mol_type = other RNA; note = pegRNA
tgcactcacactgcccagaggttttagagctagaaatagcaagttaaaataaggctagtccgttatcaacttgaaaaagtggcaccgagtcggtgcagtgaacaaattctgcaatccgcactctgggcagtgt

SEQ ID NO: 2449 - RNA, 133 nt, synthetic construct
  source 1..133: mol_type = other RNA; note = pegRNA
tgcactcacactgcccagaggttttagagctagaaatagcaagttaaaataaggctagtccgttatcaacttgaaaaagtggcaccgagtcggtgcattctgcaatccacactctgggcagtgtgagtgtttt

SEQ ID NO: 2450 - RNA, 133 nt, synthetic construct
  source 1..133: mol_type = other RNA; note = pegRNA
tgcactcacactgcccagaggttttagagctagaaatagcaagttaaaataaggctagtccgttatcaacttgaaaaagtggcaccgagtcggtgcattctgcaatccgcactctgggcagtgtgagtgtttt

SEQ ID NO: 2451 - RNA, 133 nt, synthetic construct
  source 1..133: mol_type = other RNA; note = pegRNA
tgcactcacactgcccagaggttttagagctagaaatagcaagttaaaataaggctagtccgttatcaacttgaaaaagtggcaccgagtcggtgccaaattctgcaatccacactctgggcagtgtgagtgc

SEQ ID NO: 2452 - RNA, 133 nt, synthetic construct
  source 1..133: mol_type = other RNA; note = pegRNA
tgcactcacactgcccagaggttttagagctagaaatagcaagttaaaataaggctagtccgttatcaacttgaaaaagtggcaccgagtcggtgccaaattctgcaatccacactctgggcagtgtgatttt

SEQ ID NO: 2453 - RNA, 133 nt, synthetic construct
  source 1..133: mol_type = other RNA; note = pegRNA
tgcactcacactgcccagaggttttagagctagaaatagcaagttaaaataaggctagtccgttatcaacttgaaaaagtggcaccgagtcggtgccaaattctgcaatccgcactctgggcagtgtgagtgc

SEQ ID NO: 2454 - RNA, 133 nt, synthetic construct
  source 1..133: mol_type = other RNA; note = pegRNA
tgcactcacactgcccagaggttttagagctagaaatagcaagttaaaataaggctagtccgttatcaacttgaaaaagtggcaccgagtcggtgccaaattctgcaatccgcactctgggcagtgtgatttt

SEQ ID NO: 2455 - RNA, 133 nt, synthetic construct
  source 1..133: mol_type = other RNA; note = pegRNA
tgcactcacactgcccagaggttttagagctagaaatagcaagttaaaataaggctagtccgttatcaacttgaaaaagtggcaccgagtcggtgccagtgaacaaattctgcaatccacactctgggcagtg

SEQ ID NO: 2456 - RNA, 133 nt, synthetic construct
  source 1..133: mol_type = other RNA; note = pegRNA
tgcactcacactgcccagaggttttagagctagaaatagcaagttaaaataaggctagtccgttatcaacttgaaaaagtggcaccgagtcggtgccagtgaacaaattctgcaatccgcactctgggcagtg

SEQ ID NO: 2457 - RNA, 133 nt, synthetic construct
  source 1..133: mol_type = other RNA; note = pegRNA
tgcactcacactgcccagaggttttagagctagaaatagcaagttaaaataaggctagtccgttatcaacttgaaaaagtggcaccgagtcggtgcgaacaaattctgcaatccacactctgggcagtgtgag

SEQ ID NO: 2458 - RNA, 133 nt, synthetic construct
  source 1..133: mol_type = other RNA; note = pegRNA
tgcactcacactgcccagaggttttagagctagaaatagcaagttaaaataaggctagtccgttatcaacttgaaaaagtggcaccgagtcggtgcgaacaaattctgcaatccacactctgggcagtgtttt

SEQ ID NO: 2459 - RNA, 133 nt, synthetic construct
  source 1..133: mol_type = other RNA; note = pegRNA
tgcactcacactgcccagaggttttagagctagaaatagcaagttaaaataaggctagtccgttatcaacttgaaaaagtggcaccgagtcggtgcgaacaaattctgcaatccgcactctgggcagtgtgag

SEQ ID NO: 2460 - RNA, 133 nt, synthetic construct
  source 1..133: mol_type = other RNA; note = pegRNA
tgcactcacactgcccagaggttttagagctagaaatagcaagttaaaataaggctagtccgttatcaacttgaaaaagtggcaccgagtcggtgcgaacaaattctgcaatccgcactctgggcagtgtttt

SEQ ID NO: 2461 - RNA, 133 nt, synthetic construct
  source 1..133: mol_type = other RNA; note = pegRNA
tgcactcacactgcccagaggttttagagctagaaatagcaagttaaaataaggctagtccgttatcaacttgaaaaagtggcaccgagtcggtgcgtgaacaaattctgcaatccacactctgggcagtgtg

SEQ ID NO: 2462 - RNA, 133 nt, synthetic construct
  source 1..133: mol_type = other RNA; note = pegRNA
tgcactcacactgcccagaggttttagagctagaaatagcaagttaaaataaggctagtccgttatcaacttgaaaaagtggcaccgagtcggtgcgtgaacaaattctgcaatccgcactctgggcagtgtg

SEQ ID NO: 2463 - RNA, 133 nt, synthetic construct
  source 1..133: mol_type = other RNA; note = pegRNA
tgcactcacactgcccagaggttttagagctagaaatagcaagttaaaataaggctagtccgttatcaacttgaaaaagtggcaccgagtcggtgctcagtgaacaaattctgcaatccacactctgggcagt

SEQ ID NO: 2464 - RNA, 133 nt, synthetic construct
  source 1..133: mol_type = other RNA; note = pegRNA
tgcactcacactgcccagaggttttagagctagaaatagcaagttaaaataaggctagtccgttatcaacttgaaaaagtggcaccgagtcggtgctcagtgaacaaattctgcaatccgcactctgggcagt

SEQ ID NO: 2465 - RNA, 133 nt, synthetic construct
  source 1..133: mol_type = other RNA; note = pegRNA
tgcactcacactgcccagaggttttagagctagaaatagcaagttaaaataaggctagtccgttatcaacttgaaaaagtggcaccgagtcggtgctgaacaaattctgcaatccacactctgggcagtgtga

SEQ ID NO: 2466 - RNA, 133 nt, synthetic construct
  source 1..133: mol_type = other RNA; note = pegRNA
tgcactcacactgcccagaggttttagagctagaaatagcaagttaaaataaggctagtccgttatcaacttgaaaaagtggcaccgagtcggtgctgaacaaattctgcaatccacactctgggcagttttt

SEQ ID NO: 2467 - RNA, 133 nt, synthetic construct
  source 1..133: mol_type = other RNA; note = pegRNA
tgcactcacactgcccagaggttttagagctagaaatagcaagttaaaataaggctagtccgttatcaacttgaaaaagtggcaccgagtcggtgctgaacaaattctgcaatccgcactctgggcagtgtga

SEQ ID NO: 2468 - RNA, 133 nt, synthetic construct
  source 1..133: mol_type = other RNA; note = pegRNA
tgcactcacactgcccagaggttttagagctagaaatagcaagttaaaataaggctagtccgttatcaacttgaaaaagtggcaccgagtcggtgctgaacaaattctgcaatccgcactctgggcagttttt

SEQ ID NO: 2469 - RNA, 133 nt, synthetic construct
  source 1..133: mol_type = other RNA; note = pegRNA
tgcactcacactgcccagaggttttagagctagaaatagcaagttaaaataaggctagtccgttatcaacttgaaaaagtggcaccgagtcggtgcttctgcaatccacactctgggcagtgtgagtgctttt

SEQ ID NO: 2470 - RNA, 133 nt, synthetic construct
  source 1..133: mol_type = other RNA; note = pegRNA
tgcactcacactgcccagaggttttagagctagaaatagcaagttaaaataaggctagtccgttatcaacttgaaaaagtggcaccgagtcggtgcttctgcaatccgcactctgggcagtgtgagtgctttt

SEQ ID NO: 2471 - RNA, 134 nt, synthetic construct
  source 1..134: mol_type = other RNA; note = pegRNA
tgcactcacactgcccagaggttttagagctagaaatagcaagttaaaataaggctagtccgttatcaacttgaaaaagtggcaccgagtcggtgcaaattctgcaatccacactctgggcagtgtgagttttt

SEQ ID NO: 2472 - RNA, 134 nt, synthetic construct
  source 1..134: mol_type = other RNA; note = pegRNA
tgcactcacactgcccagaggttttagagctagaaatagcaagttaaaataaggctagtccgttatcaacttgaaaaagtggcaccgagtcggtgcaaattctgcaatccgcactctgggcagtgtgagttttt

SEQ ID NO: 2473 - RNA, 134 nt, synthetic construct
  source 1..134: mol_type = other RNA; note = pegRNA
tgcactcacactgcccagaggttttagagctagaaatagcaagttaaaataaggctagtccgttatcaacttgaaaaagtggcaccgagtcggtgcaacaaattctgcaatccacactctgggcagtgtgagtg

SEQ ID NO: 2474 - RNA, 134 nt, synthetic construct
  source 1..134: mol_type = other RNA; note = pegRNA
tgcactcacactgcccagaggttttagagctagaaatagcaagttaaaataaggctagtccgttatcaacttgaaaaagtggcaccgagtcggtgcaacaaattctgcaatccacactctgggcagtgtgtttt

SEQ ID NO: 2475 - RNA, 134 nt, synthetic construct
  source 1..134: mol_type = other RNA; note = pegRNA
tgcactcacactgcccagaggttttagagctagaaatagcaagttaaaataaggctagtccgttatcaacttgaaaaagtggcaccgagtcggtgcaacaaattctgcaatccgcactctgggcagtgtgagtg

SEQ ID NO: 2476 - RNA, 134 nt, synthetic construct
  source 1..134: mol_type = other RNA; note = pegRNA
tgcactcacactgcccagaggttttagagctagaaatagcaagttaaaataaggctagtccgttatcaacttgaaaaagtggcaccgagtcggtgcaacaaattctgcaatccgcactctgggcagtgtgtttt

SEQ ID NO: 2477 - RNA, 134 nt, synthetic construct
  source 1..134: mol_type = other RNA; note = pegRNA
tgcactcacactgcccagaggttttagagctagaaatagcaagttaaaataaggctagtccgttatcaacttgaaaaagtggcaccgagtcggtgcaattctgcaatccacactctgggcagtgtgagtgtttt

SEQ ID NO: 2478 - RNA, 134 nt, synthetic construct
  source 1..134: mol_type = other RNA; note = pegRNA
tgcactcacactgcccagaggttttagagctagaaatagcaagttaaaataaggctagtccgttatcaacttgaaaaagtggcaccgagtcggtgcaattctgcaatccgcactctgggcagtgtgagtgtttt

SEQ ID NO: 2479 - RNA, 134 nt, synthetic construct
  source 1..134: mol_type = other RNA; note = pegRNA
tgcactcacactgcccagaggttttagagctagaaatagcaagttaaaataaggctagtccgttatcaacttgaaaaagtggcaccgagtcggtgcacaaattctgcaatccacactctgggcagtgtgagtgc

SEQ ID NO: 2480 - RNA, 134 nt, synthetic construct
  source 1..134: mol_type = other RNA; note = pegRNA
tgcactcacactgcccagaggttttagagctagaaatagcaagttaaaataaggctagtccgttatcaacttgaaaaagtggcaccgagtcggtgcacaaattctgcaatccacactctgggcagtgtgatttt

SEQ ID NO: 2481 - RNA, 134 nt, synthetic construct
  source 1..134: mol_type = other RNA; note = pegRNA
tgcactcacactgcccagaggttttagagctagaaatagcaagttaaaataaggctagtccgttatcaacttgaaaaagtggcaccgagtcggtgcacaaattctgcaatccgcactctgggcagtgtgagtgc

SEQ ID NO: 2482 - RNA, 134 nt, synthetic construct
  source 1..134: mol_type = other RNA; note = pegRNA
tgcactcacactgcccagaggttttagagctagaaatagcaagttaaaataaggctagtccgttatcaacttgaaaaagtggcaccgagtcggtgcacaaattctgcaatccgcactctgggcagtgtgatttt

SEQ ID NO: 2483 - RNA, 134 nt, synthetic construct
  source 1..134: mol_type = other RNA; note = pegRNA
tgcactcacactgcccagaggttttagagctagaaatagcaagttaaaataaggctagtccgttatcaacttgaaaaagtggcaccgagtcggtgcacaaattctgcaatcctcactctgggcagtgtgatttt

SEQ ID NO: 2484 - RNA, 134 nt, synthetic construct
  source 1..134: mol_type = other RNA; note = pegRNA
tgcactcacactgcccagaggttttagagctagaaatagcaagttaaaataaggctagtccgttatcaacttgaaaaagtggcaccgagtcggtgcagtgaacaaattctgcaatccacactctgggcagtgtg

SEQ ID NO: 2485 - RNA, 134 nt, synthetic construct
  source 1..134: mol_type = other RNA; note = pegRNA
tgcactcacactgcccagaggttttagagctagaaatagcaagttaaaataaggctagtccgttatcaacttgaaaaagtggcaccgagtcggtgcagtgaacaaattctgcaatccgcactctgggcagtgtg

SEQ ID NO: 2486 - RNA, 134 nt, synthetic construct
  source 1..134: mol_type = other RNA; note = pegRNA
tgcactcacactgcccagaggttttagagctagaaatagcaagttaaaataaggctagtccgttatcaacttgaaaaagtggcaccgagtcggtgcattctgcaatccacactctgggcagtgtgagtgctttt

SEQ ID NO: 2487 - RNA, 134 nt, synthetic construct
  source 1..134: mol_type = other RNA; note = pegRNA
tgcactcacactgcccagaggttttagagctagaaatagcaagttaaaataaggctagtccgttatcaacttgaaaaagtggcaccgagtcggtgcattctgcaatccgcactctgggcagtgtgagtgctttt

SEQ ID NO: 2488 - RNA, 134 nt, synthetic construct
  source 1..134: mol_type = other RNA; note = pegRNA
tgcactcacactgcccagaggttttagagctagaaatagcaagttaaaataaggctagtccgttatcaacttgaaaaagtggcaccgagtcggtgccaaattctgcaatccacactctgggcagtgtgagtttt

SEQ ID NO: 2489 - RNA, 134 nt, synthetic construct
  source 1..134: mol_type = other RNA; note = pegRNA
tgcactcacactgcccagaggttttagagctagaaatagcaagttaaaataaggctagtccgttatcaacttgaaaaagtggcaccgagtcggtgccaaattctgcaatccgcactctgggcagtgtgagtttt

SEQ ID NO: 2490 - RNA, 134 nt, synthetic construct
  source 1..134: mol_type = other RNA; note = pegRNA
tgcactcacactgcccagaggttttagagctagaaatagcaagttaaaataaggctagtccgttatcaacttgaaaaagtggcaccgagtcggtgccagtgaacaaattctgcaatccacactctgggcagtgt

SEQ ID NO: 2491 - RNA, 134 nt, synthetic construct
  source 1..134: mol_type = other RNA; note = pegRNA
tgcactcacactgcccagaggttttagagctagaaatagcaagttaaaataaggctagtccgttatcaacttgaaaaagtggcaccgagtcggtgccagtgaacaaattctgcaatccgcactctgggcagtgt

SEQ ID NO: 2492 - RNA, 134 nt, synthetic construct
  source 1..134: mol_type = other RNA; note = pegRNA
tgcactcacactgcccagaggttttagagctagaaatagcaagttaaaataaggctagtccgttatcaacttgaaaaagtggcaccgagtcggtgcctcagtgaacaaattctgcaatccacactctgggcagt

SEQ ID NO: 2493 - RNA, 134 nt, synthetic construct
  source 1..134: mol_type = other RNA; note = pegRNA
tgcactcacactgcccagaggttttagagctagaaatagcaagttaaaataaggctagtccgttatcaacttgaaaaagtggcaccgagtcggtgcctcagtgaacaaattctgcaatccgcactctgggcagt

SEQ ID NO: 2494 - RNA, 134 nt, synthetic construct
  source 1..134: mol_type = other RNA; note = pegRNA
tgcactcacactgcccagaggttttagagctagaaatagcaagttaaaataaggctagtccgttatcaacttgaaaaagtggcaccgagtcggtgcgaacaaattctgcaatccacactctgggcagtgtgagt

SEQ ID NO: 2495 - RNA, 134 nt, synthetic construct
  source 1..134: mol_type = other RNA; note = pegRNA
tgcactcacactgcccagaggttttagagctagaaatagcaagttaaaataaggctagtccgttatcaacttgaaaaagtggcaccgagtcggtgcgaacaaattctgcaatccacactctgggcagtgttttt

SEQ ID NO: 2496 - RNA, 134 nt, synthetic construct
  source 1..134: mol_type = other RNA; note = pegRNA
tgcactcacactgcccagaggttttagagctagaaatagcaagttaaaataaggctagtccgttatcaacttgaaaaagtggcaccgagtcggtgcgaacaaattctgcaatccgcactctgggcagtgtgagt

SEQ ID NO: 2497 - RNA, 134 nt, synthetic construct
  source 1..134: mol_type = other RNA; note = pegRNA
tgcactcacactgcccagaggttttagagctagaaatagcaagttaaaataaggctagtccgttatcaacttgaaaaagtggcaccgagtcggtgcgaacaaattctgcaatccgcactctgggcagtgttttt

SEQ ID NO: 2498 - RNA, 134 nt, synthetic construct
  source 1..134: mol_type = other RNA; note = pegRNA
tgcactcacactgcccagaggttttagagctagaaatagcaagttaaaataaggctagtccgttatcaacttgaaaaagtggcaccgagtcggtgcgtgaacaaattctgcaatccacactctgggcagtgtga

SEQ ID NO: 2499 - RNA, 134 nt, synthetic construct
  source 1..134: mol_type = other RNA; note = pegRNA
tgcactcacactgcccagaggttttagagctagaaatagcaagttaaaataaggctagtccgttatcaacttgaaaaagtggcaccgagtcggtgcgtgaacaaattctgcaatccacactctgggcagttttt

SEQ ID NO: 2500 - RNA, 134 nt, synthetic construct
  source 1..134: mol_type = other RNA; note = pegRNA
tgcactcacactgcccagaggttttagagctagaaatagcaagttaaaataaggctagtccgttatcaacttgaaaaagtggcaccgagtcggtgcgtgaacaaattctgcaatccgcactctgggcagtgtga

SEQ ID NO: 2501 - RNA, 134 nt, synthetic construct
  source 1..134: mol_type = other RNA; note = pegRNA
tgcactcacactgcccagaggttttagagctagaaatagcaagttaaaataaggctagtccgttatcaacttgaaaaagtggcaccgagtcggtgcgtgaacaaattctgcaatccgcactctgggcagttttt

SEQ ID NO: 2502 - RNA, 134 nt, synthetic construct
  source 1..134: mol_type = other RNA; note = pegRNA
tgcactcacactgcccagaggttttagagctagaaatagcaagttaaaataaggctagtccgttatcaacttgaaaaagtggcaccgagtcggtgctcagtgaacaaattctgcaatccacactctgggcagtg

SEQ ID NO: 2503 - RNA, 134 nt, synthetic construct
  source 1..134: mol_type = other RNA; note = pegRNA
tgcactcacactgcccagaggttttagagctagaaatagcaagttaaaataaggctagtccgttatcaacttgaaaaagtggcaccgagtcggtgctcagtgaacaaattctgcaatccgcactctgggcagtg

SEQ ID NO: 2504 - RNA, 134 nt, synthetic construct
  source 1..134: mol_type = other RNA; note = pegRNA
tgcactcacactgcccagaggttttagagctagaaatagcaagttaaaataaggctagtccgttatcaacttgaaaaagtggcaccgagtcggtgctgaacaaattctgcaatccacactctgggcagtgtgag

SEQ ID NO: 2505 - RNA, 134 nt, synthetic construct
  source 1..134: mol_type = other RNA; note = pegRNA
tgcactcacactgcccagaggttttagagctagaaatagcaagttaaaataaggctagtccgttatcaacttgaaaaagtggcaccgagtcggtgctgaacaaattctgcaatccacactctgggcagtgtttt

SEQ ID NO: 2506 - RNA, 134 nt, synthetic construct
  source 1..134: mol_type = other RNA; note = pegRNA
tgcactcacactgcccagaggttttagagctagaaatagcaagttaaaataaggctagtccgttatcaacttgaaaaagtggcaccgagtcggtgctgaacaaattctgcaatccgcactctgggcagtgtgag

SEQ ID NO: 2507 - RNA, 134 nt, synthetic construct
  source 1..134: mol_type = other RNA; note = pegRNA
tgcactcacactgcccagaggttttagagctagaaatagcaagttaaaataaggctagtccgttatcaacttgaaaaagtggcaccgagtcggtgctgaacaaattctgcaatccgcactctgggcagtgtttt

SEQ ID NO: 2508 - RNA, 135 nt, synthetic construct
  source 1..135: mol_type = other RNA; note = pegRNA
tgcactcacactgcccagaggttttagagctagaaatagcaagttaaaataaggctagtccgttatcaacttgaaaaagtggcaccgagtcggtgcaaattctgcaatccacactctgggcagtgtgagtgtttt

SEQ ID NO: 2509 - RNA, 135 nt, synthetic construct
  source 1..135: mol_type = other RNA; note = pegRNA
tgcactcacactgcccagaggttttagagctagaaatagcaagttaaaataaggctagtccgttatcaacttgaaaaagtggcaccgagtcggtgcaaattctgcaatccgcactctgggcagtgtgagtgtttt

SEQ ID NO: 2510 - RNA, 135 nt, synthetic construct
  source 1..135: mol_type = other RNA; note = pegRNA
tgcactcacactgcccagaggttttagagctagaaatagcaagttaaaataaggctagtccgttatcaacttgaaaaagtggcaccgagtcggtgcaacaaattctgcaatccacactctgggcagtgtgagtgc

SEQ ID NO: 2511 - RNA, 135 nt, synthetic construct
  source 1..135: mol_type = other RNA; note = pegRNA
tgcactcacactgcccagaggttttagagctagaaatagcaagttaaaataaggctagtccgttatcaacttgaaaaagtggcaccgagtcggtgcaacaaattctgcaatccacactctgggcagtgtgatttt

SEQ ID NO: 2512 - RNA, 135 nt, synthetic construct
  source 1..135: mol_type = other RNA; note = pegRNA
tgcactcacactgcccagaggttttagagctagaaatagcaagttaaaataaggctagtccgttatcaacttgaaaaagtggcaccgagtcggtgcaacaaattctgcaatccgcactctgggcagtgtgagtgc

SEQ ID NO: 2513 - RNA, 135 nt, synthetic construct
  source 1..135: mol_type = other RNA; note = pegRNA
tgcactcacactgcccagaggttttagagctagaaatagcaagttaaaataaggctagtccgttatcaacttgaaaaagtggcaccgagtcggtgcaacaaattctgcaatccgcactctgggcagtgtgatttt

SEQ ID NO: 2514 - RNA, 135 nt, synthetic construct
  source 1..135: mol_type = other RNA; note = pegRNA
tgcactcacactgcccagaggttttagagctagaaatagcaagttaaaataaggctagtccgttatcaacttgaaaaagtggcaccgagtcggtgcaacaaattctgcaatcctcactctgggcagtgtgatttt

SEQ ID NO: 2515 - RNA, 135 nt, synthetic construct
  source 1..135: mol_type = other RNA; note = pegRNA
tgcactcacactgcccagaggttttagagctagaaatagcaagttaaaataaggctagtccgttatcaacttgaaaaagtggcaccgagtcggtgcaattctgcaatccacactctgggcagtgtgagtgctttt

SEQ ID NO: 2516 - RNA, 135 nt, synthetic construct
  source 1..135: mol_type = other RNA; note = pegRNA
tgcactcacactgcccagaggttttagagctagaaatagcaagttaaaataaggctagtccgttatcaacttgaaaaagtggcaccgagtcggtgcaattctgcaatccgcactctgggcagtgtgagtgctttt

SEQ ID NO: 2517 - RNA, 135 nt, synthetic construct
  source 1..135: mol_type = other RNA; note = pegRNA
tgcactcacactgcccagaggttttagagctagaaatagcaagttaaaataaggctagtccgttatcaacttgaaaaagtggcaccgagtcggtgcacaaattctgcaatccacactctgggcagtgtgagtttt

SEQ ID NO: 2518 - RNA, 135 nt, synthetic construct
  source 1..135: mol_type = other RNA; note = pegRNA
tgcactcacactgcccagaggttttagagctagaaatagcaagttaaaataaggctagtccgttatcaacttgaaaaagtggcaccgagtcggtgcacaaattctgcaatccgcactctgggcagtgtgagtttt

SEQ ID NO: 2519 - RNA, 135 nt, synthetic construct
  source 1..135: mol_type = other RNA; note = pegRNA
tgcactcacactgcccagaggttttagagctagaaatagcaagttaaaataaggctagtccgttatcaacttgaaaaagtggcaccgagtcggtgcagtgaacaaattctgcaatccacactctgggcagtgtga

SEQ ID NO: 2520 - RNA, 135 nt, synthetic construct
  source 1..135: mol_type = other RNA; note = pegRNA
tgcactcacactgcccagaggttttagagctagaaatagcaagttaaaataaggctagtccgttatcaacttgaaaaagtggcaccgagtcggtgcagtgaacaaattctgcaatccacactctgggcagttttt

SEQ ID NO: 2521 - RNA, 135 nt, synthetic construct
  source 1..135: mol_type = other RNA; note = pegRNA
tgcactcacactgcccagaggttttagagctagaaatagcaagttaaaataaggctagtccgttatcaacttgaaaaagtggcaccgagtcggtgcagtgaacaaattctgcaatccgcactctgggcagtgtga

SEQ ID NO: 2522 - RNA, 135 nt, synthetic construct
  source 1..135: mol_type = other RNA; note = pegRNA
tgcactcacactgcccagaggttttagagctagaaatagcaagttaaaataaggctagtccgttatcaacttgaaaaagtggcaccgagtcggtgcagtgaacaaattctgcaatccgcactctgggcagttttt

SEQ ID NO: 2523 - RNA, 135 nt, synthetic construct
  source 1..135: mol_type = other RNA; note = pegRNA
tgcactcacactgcccagaggttttagagctagaaatagcaagttaaaataaggctagtccgttatcaacttgaaaaagtggcaccgagtcggtgccaaattctgcaatccacactctgggcagtgtgagttttt

SEQ ID NO: 2524 - RNA, 135 nt, synthetic construct
  source 1..135: mol_type = other RNA; note = pegRNA
tgcactcacactgcccagaggttttagagctagaaatagcaagttaaaataaggctagtccgttatcaacttgaaaaagtggcaccgagtcggtgccaaattctgcaatccgcactctgggcagtgtgagttttt

SEQ ID NO: 2525 - RNA, 135 nt, synthetic construct
  source 1..135: mol_type = other RNA; note = pegRNA
tgcactcacactgcccagaggttttagagctagaaatagcaagttaaaataaggctagtccgttatcaacttgaaaaagtggcaccgagtcggtgccagtgaacaaattctgcaatccacactctgggcagtgtg

SEQ ID NO: 2526 - RNA, 135 nt, synthetic construct
  source 1..135: mol_type = other RNA; note = pegRNA
tgcactcacactgcccagaggttttagagctagaaatagcaagttaaaataaggctagtccgttatcaacttgaaaaagtggcaccgagtcggtgccagtgaacaaattctgcaatccgcactctgggcagtgtg

SEQ ID NO: 2527 - RNA, 135 nt, synthetic construct
  source 1..135: mol_type = other RNA; note = pegRNA
tgcactcacactgcccagaggttttagagctagaaatagcaagttaaaataaggctagtccgttatcaacttgaaaaagtggcaccgagtcggtgcctcagtgaacaaattctgcaatccacactctgggcagtg

SEQ ID NO: 2528 - RNA, 135 nt, synthetic construct
  source 1..135: mol_type = other RNA; note = pegRNA
tgcactcacactgcccagaggttttagagctagaaatagcaagttaaaataaggctagtccgttatcaacttgaaaaagtggcaccgagtcggtgcctcagtgaacaaattctgcaatccgcactctgggcagtg

SEQ ID NO: 2529 - RNA, 135 nt, synthetic construct
  source 1..135: mol_type = other RNA; note = pegRNA
tgcactcacactgcccagaggttttagagctagaaatagcaagttaaaataaggctagtccgttatcaacttgaaaaagtggcaccgagtcggtgcgaacaaattctgcaatccacactctgggcagtgtgagtg

SEQ ID NO: 2530 - RNA, 135 nt, synthetic construct
  source 1..135: mol_type = other RNA; note = pegRNA
tgcactcacactgcccagaggttttagagctagaaatagcaagttaaaataaggctagtccgttatcaacttgaaaaagtggcaccgagtcggtgcgaacaaattctgcaatccacactctgggcagtgtgtttt

SEQ ID NO: 2531 - RNA, 135 nt, synthetic construct
  source 1..135: mol_type = other RNA; note = pegRNA
tgcactcacactgcccagaggttttagagctagaaatagcaagttaaaataaggctagtccgttatcaacttgaaaaagtggcaccgagtcggtgcgaacaaattctgcaatccgcactctgggcagtgtgagtg

SEQ ID NO: 2532 - RNA, 135 nt, synthetic construct
  source 1..135: mol_type = other RNA; note = pegRNA
tgcactcacactgcccagaggttttagagctagaaatagcaagttaaaataaggctagtccgttatcaacttgaaaaagtggcaccgagtcggtgcgaacaaattctgcaatccgcactctgggcagtgtgtttt

SEQ ID NO: 2533 - RNA, 135 nt, synthetic construct
  source 1..135: mol_type = other RNA; note = pegRNA
tgcactcacactgcccagaggttttagagctagaaatagcaagttaaaataaggctagtccgttatcaacttgaaaaagtggcaccgagtcggtgcgctcagtgaacaaattctgcaatccacactctgggcagt

SEQ ID NO: 2534 - RNA, 135 nt, synthetic construct
  source 1..135: mol_type = other RNA; note = pegRNA
tgcactcacactgcccagaggttttagagctagaaatagcaagttaaaataaggctagtccgttatcaacttgaaaaagtggcaccgagtcggtgcgctcagtgaacaaattctgcaatccgcactctgggcagt

SEQ ID NO: 2535 - RNA, 135 nt, synthetic construct
  source 1..135: mol_type = other RNA; note = pegRNA
tgcactcacactgcccagaggttttagagctagaaatagcaagttaaaataaggctagtccgttatcaacttgaaaaagtggcaccgagtcggtgcgtgaacaaattctgcaatccacactctgggcagtgtgag

SEQ ID NO: 2536 - RNA, 135 nt, synthetic construct
  source 1..135: mol_type = other RNA; note = pegRNA
tgcactcacactgcccagaggttttagagctagaaatagcaagttaaaataaggctagtccgttatcaacttgaaaaagtggcaccgagtcggtgcgtgaacaaattctgcaatccacactctgggcagtgtttt

SEQ ID NO: 2537 - RNA, 135 nt, synthetic construct
  source 1..135: mol_type = other RNA; note = pegRNA
tgcactcacactgcccagaggttttagagctagaaatagcaagttaaaataaggctagtccgttatcaacttgaaaaagtggcaccgagtcggtgcgtgaacaaattctgcaatccgcactctgggcagtgtgag

SEQ ID NO: 2538 - RNA, 135 nt, synthetic construct
  source 1..135: mol_type = other RNA; note = pegRNA
tgcactcacactgcccagaggttttagagctagaaatagcaagttaaaataaggctagtccgttatcaacttgaaaaagtggcaccgagtcggtgcgtgaacaaattctgcaatccgcactctgggcagtgtttt

SEQ ID NO: 2539 - RNA, 135 nt, synthetic construct
  source 1..135: mol_type = other RNA; note = pegRNA
tgcactcacactgcccagaggttttagagctagaaatagcaagttaaaataaggctagtccgttatcaacttgaaaaagtggcaccgagtcggtgctcagtgaacaaattctgcaatccacactctgggcagtgt

SEQ ID NO: 2540 - RNA, 135 nt, synthetic construct
  source 1..135: mol_type = other RNA; note = pegRNA
tgcactcacactgcccagaggttttagagctagaaatagcaagttaaaataaggctagtccgttatcaacttgaaaaagtggcaccgagtcggtgctcagtgaacaaattctgcaatccgcactctgggcagtgt

SEQ ID NO: 2541 - RNA, 135 nt, synthetic construct
  source 1..135: mol_type = other RNA; note = pegRNA
tgcactcacactgcccagaggttttagagctagaaatagcaagttaaaataaggctagtccgttatcaacttgaaaaagtggcaccgagtcggtgctgaacaaattctgcaatccacactctgggcagtgtgagt

SEQ ID NO: 2542 - RNA, 135 nt, synthetic construct
  source 1..135: mol_type = other RNA; note = pegRNA
tgcactcacactgcccagaggttttagagctagaaatagcaagttaaaataaggctagtccgttatcaacttgaaaaagtggcaccgagtcggtgctgaacaaattctgcaatccacactctgggcagtgttttt

SEQ ID NO: 2543 - RNA, 135 nt, synthetic construct
  source 1..135: mol_type = other RNA; note = pegRNA
tgcactcacactgcccagaggttttagagctagaaatagcaagttaaaataaggctagtccgttatcaacttgaaaaagtggcaccgagtcggtgctgaacaaattctgcaatccgcactctgggcagtgtgagt

SEQ ID NO: 2544 - RNA, 135 nt, synthetic construct
  source 1..135: mol_type = other RNA; note = pegRNA
tgcactcacactgcccagaggttttagagctagaaatagcaagttaaaataaggctagtccgttatcaacttgaaaaagtggcaccgagtcggtgctgaacaaattctgcaatccgcactctgggcagtgttttt

SEQ ID NO: 2545 - RNA, 136 nt, synthetic construct
  source 1..136: mol_type = other RNA; note = pegRNA
tgcactcacactgcccagaggttttagagctagaaatagcaagttaaaataaggctagtccgttatcaacttgaaaaagtggcaccgagtcggtgcaaattctgcaatccacactctgggcagtgtgagtgctttt

SEQ ID NO: 2546 - RNA, 136 nt, synthetic construct
  source 1..136: mol_type = other RNA; note = pegRNA
tgcactcacactgcccagaggttttagagctagaaatagcaagttaaaataaggctagtccgttatcaacttgaaaaagtggcaccgagtcggtgcaaattctgcaatccgcactctgggcagtgtgagtgctttt

SEQ ID NO: 2547 - RNA, 136 nt, synthetic construct
  source 1..136: mol_type = other RNA; note = pegRNA
tgcactcacactgcccagaggttttagagctagaaatagcaagttaaaataaggctagtccgttatcaacttgaaaaagtggcaccgagtcggtgcaacaaattctgcaatccacactctgggcagtgtgagtttt

SEQ ID NO: 2548 - RNA, 136 nt, synthetic construct
  source 1..136: mol_type = other RNA; note = pegRNA
tgcactcacactgcccagaggttttagagctagaaatagcaagttaaaataaggctagtccgttatcaacttgaaaaagtggcaccgagtcggtgcaacaaattctgcaatccgcactctgggcagtgtgagtttt

SEQ ID NO: 2549 - RNA, 136 nt, synthetic construct
  source 1..136: mol_type = other RNA; note = pegRNA
tgcactcacactgcccagaggttttagagctagaaatagcaagttaaaataaggctagtccgttatcaacttgaaaaagtggcaccgagtcggtgcacaaattctgcaatccacactctgggcagtgtgagttttt

SEQ ID NO: 2550 - RNA, 136 nt, synthetic construct
  source 1..136: mol_type = other RNA; note = pegRNA
tgcactcacactgcccagaggttttagagctagaaatagcaagttaaaataaggctagtccgttatcaacttgaaaaagtggcaccgagtcggtgcacaaattctgcaatccgcactctgggcagtgtgagttttt

SEQ ID NO: 2551 - RNA, 136 nt, synthetic construct
  source 1..136: mol_type = other RNA; note = pegRNA
tgcactcacactgcccagaggttttagagctagaaatagcaagttaaaataaggctagtccgttatcaacttgaaaaagtggcaccgagtcggtgcacaaattctgcaatcctcactctgggcagtgtgagttttt

SEQ ID NO: 2552 - RNA, 136 nt, synthetic construct
  source 1..136: mol_type = other RNA; note = pegRNA
tgcactcacactgcccagaggttttagagctagaaatagcaagttaaaataaggctagtccgttatcaacttgaaaaagtggcaccgagtcggtgcagtgaacaaattctgcaatccacactctgggcagtgtgag

SEQ ID NO: 2553 - RNA, 136 nt, synthetic construct
  source 1..136: mol_type = other RNA; note = pegRNA
tgcactcacactgcccagaggttttagagctagaaatagcaagttaaaataaggctagtccgttatcaacttgaaaaagtggcaccgagtcggtgcagtgaacaaattctgcaatccacactctgggcagtgtttt

SEQ ID NO: 2554 - RNA, 136 nt, synthetic construct
  source 1..136: mol_type = other RNA; note = pegRNA
tgcactcacactgcccagaggttttagagctagaaatagcaagttaaaataaggctagtccgttatcaacttgaaaaagtggcaccgagtcggtgcagtgaacaaattctgcaatccgcactctgggcagtgtgag

SEQ ID NO: 2555 - RNA, 136 nt, synthetic construct
  source 1..136: mol_type = other RNA; note = pegRNA
tgcactcacactgcccagaggttttagagctagaaatagcaagttaaaataaggctagtccgttatcaacttgaaaaagtggcaccgagtcggtgcagtgaacaaattctgcaatccgcactctgggcagtgtttt

SEQ ID NO: 2556 - RNA, 136 nt, synthetic construct
  source 1..136: mol_type = other RNA; note = pegRNA
tgcactcacactgcccagaggttttagagctagaaatagcaagttaaaataaggctagtccgttatcaacttgaaaaagtggcaccgagtcggtgccaaattctgcaatccacactctgggcagtgtgagtgtttt

SEQ ID NO: 2557 - RNA, 136 nt, synthetic construct
  source 1..136: mol_type = other RNA; note = pegRNA
tgcactcacactgcccagaggttttagagctagaaatagcaagttaaaataaggctagtccgttatcaacttgaaaaagtggcaccgagtcggtgccaaattctgcaatccgcactctgggcagtgtgagtgtttt

SEQ ID NO: 2558 - RNA, 136 nt, synthetic construct
  source 1..136: mol_type = other RNA; note = pegRNA
tgcactcacactgcccagaggttttagagctagaaatagcaagttaaaataaggctagtccgttatcaacttgaaaaagtggcaccgagtcggtgccagtgaacaaattctgcaatccacactctgggcagtgtga

SEQ ID NO: 2559 - RNA, 136 nt, synthetic construct
  source 1..136: mol_type = other RNA; note = pegRNA
tgcactcacactgcccagaggttttagagctagaaatagcaagttaaaataaggctagtccgttatcaacttgaaaaagtggcaccgagtcggtgccagtgaacaaattctgcaatccacactctgggcagttttt

SEQ ID NO: 2560 - RNA, 136 nt, synthetic construct
  source 1..136: mol_type = other RNA; note = pegRNA
tgcactcacactgcccagaggttttagagctagaaatagcaagttaaaataaggctagtccgttatcaacttgaaaaagtggcaccgagtcggtgccagtgaacaaattctgcaatccgcactctgggcagtgtga

SEQ ID NO: 2561 - RNA, 136 nt, synthetic construct
  source 1..136: mol_type = other RNA; note = pegRNA
tgcactcacactgcccagaggttttagagctagaaatagcaagttaaaataaggctagtccgttatcaacttgaaaaagtggcaccgagtcggtgccagtgaacaaattctgcaatccgcactctgggcagttttt

SEQ ID NO: 2562 - RNA, 136 nt, synthetic construct
  source 1..136: mol_type = other RNA; note = pegRNA
tgcactcacactgcccagaggttttagagctagaaatagcaagttaaaataaggctagtccgttatcaacttgaaaaagtggcaccgagtcggtgcctcagtgaacaaattctgcaatccacactctgggcagtgt

SEQ ID NO: 2563 - RNA, 136 nt, synthetic construct
  source 1..136: mol_type = other RNA; note = pegRNA
tgcactcacactgcccagaggttttagagctagaaatagcaagttaaaataaggctagtccgttatcaacttgaaaaagtggcaccgagtcggtgcctcagtgaacaaattctgcaatccgcactctgggcagtgt

SEQ ID NO: 2564 - RNA, 136 nt, synthetic construct
  source 1..136: mol_type = other RNA; note = pegRNA
tgcactcacactgcccagaggttttagagctagaaatagcaagttaaaataaggctagtccgttatcaacttgaaaaagtggcaccgagtcggtgcgaacaaattctgcaatccacactctgggcagtgtgagtgc

SEQ ID NO: 2565 - RNA, 136 nt, synthetic construct
  source 1..136: mol_type = other RNA; note = pegRNA
tgcactcacactgcccagaggttttagagctagaaatagcaagttaaaataaggctagtccgttatcaacttgaaaaagtggcaccgagtcggtgcgaacaaattctgcaatccacactctgggcagtgtgatttt

SEQ ID NO: 2566 - RNA, 136 nt, synthetic construct
  source 1..136: mol_type = other RNA; note = pegRNA
tgcactcacactgcccagaggttttagagctagaaatagcaagttaaaataaggctagtccgttatcaacttgaaaaagtggcaccgagtcggtgcgaacaaattctgcaatccgcactctgggcagtgtgagtgc

SEQ ID NO: 2567 - RNA, 136 nt, synthetic construct
  source 1..136: mol_type = other RNA; note = pegRNA
tgcactcacactgcccagaggttttagagctagaaatagcaagttaaaataaggctagtccgttatcaacttgaaaaagtggcaccgagtcggtgcgaacaaattctgcaatccgcactctgggcagtgtgatttt

SEQ ID NO: 2568 - RNA, 136 nt, synthetic construct
  source 1..136: mol_type = other RNA; note = pegRNA
tgcactcacactgcccagaggttttagagctagaaatagcaagttaaaataaggctagtccgttatcaacttgaaaaagtggcaccgagtcggtgcgctcagtgaacaaattctgcaatccacactctgggcagtg

SEQ ID NO: 2569 - RNA, 136 nt, synthetic construct
  source 1..136: mol_type = other RNA; note = pegRNA
tgcactcacactgcccagaggttttagagctagaaatagcaagttaaaataaggctagtccgttatcaacttgaaaaagtggcaccgagtcggtgcgctcagtgaacaaattctgcaatccgcactctgggcagtg

SEQ ID NO: 2570 - RNA, 136 nt, synthetic construct
  source 1..136: mol_type = other RNA; note = pegRNA
tgcactcacactgcccagaggttttagagctagaaatagcaagttaaaataaggctagtccgttatcaacttgaaaaagtggcaccgagtcggtgcggctcagtgaacaaattctgcaatccacactctgggcagt

SEQ ID NO: 2571 - RNA, 136 nt, synthetic construct
  source 1..136: mol_type = other RNA; note = pegRNA
tgcactcacactgcccagaggttttagagctagaaatagcaagttaaaataaggctagtccgttatcaacttgaaaaagtggcaccgagtcggtgcggctcagtgaacaaattctgcaatccgcactctgggcagt

SEQ ID NO: 2572 - RNA, 136 nt, synthetic construct
  source 1..136: mol_type = other RNA; note = pegRNA
tgcactcacactgcccagaggttttagagctagaaatagcaagttaaaataaggctagtccgttatcaacttgaaaaagtggcaccgagtcggtgcgtgaacaaattctgcaatccacactctgggcagtgtgagt

SEQ ID NO: 2573 - RNA, 136 nt, synthetic construct
  source 1..136: mol_type = other RNA; note = pegRNA
tgcactcacactgcccagaggttttagagctagaaatagcaagttaaaataaggctagtccgttatcaacttgaaaaagtggcaccgagtcggtgcgtgaacaaattctgcaatccacactctgggcagtgttttt

SEQ ID NO: 2574 - RNA, 136 nt, synthetic construct
  source 1..136: mol_type = other RNA; note = pegRNA
tgcactcacactgcccagaggttttagagctagaaatagcaagttaaaataaggctagtccgttatcaacttgaaaaagtggcaccgagtcggtgcgtgaacaaattctgcaatccgcactctgggcagtgtgagt

SEQ ID NO: 2575 - RNA, 136 nt, synthetic construct
  source 1..136: mol_type = other RNA; note = pegRNA
tgcactcacactgcccagaggttttagagctagaaatagcaagttaaaataaggctagtccgttatcaacttgaaaaagtggcaccgagtcggtgcgtgaacaaattctgcaatccgcactctgggcagtgttttt

SEQ ID NO: 2576 - RNA, 136 nt, synthetic construct
  source 1..136: mol_type = other RNA; note = pegRNA
tgcactcacactgcccagaggttttagagctagaaatagcaagttaaaataaggctagtccgttatcaacttgaaaaagtggcaccgagtcggtgctcagtgaacaaattctgcaatccacactctgggcagtgtg

SEQ ID NO: 2577 - RNA, 136 nt, synthetic construct
  source 1..136: mol_type = other RNA; note = pegRNA
tgcactcacactgcccagaggttttagagctagaaatagcaagttaaaataaggctagtccgttatcaacttgaaaaagtggcaccgagtcggtgctcagtgaacaaattctgcaatccgcactctgggcagtgtg

SEQ ID NO: 2578 - RNA, 136 nt, synthetic construct
  source 1..136: mol_type = other RNA; note = pegRNA
tgcactcacactgcccagaggttttagagctagaaatagcaagttaaaataaggctagtccgttatcaacttgaaaaagtggcaccgagtcggtgctgaacaaattctgcaatccacactctgggcagtgtgagtg

SEQ ID NO: 2579 - RNA, 136 nt, synthetic construct
  source 1..136: mol_type = other RNA; note = pegRNA
tgcactcacactgcccagaggttttagagctagaaatagcaagttaaaataaggctagtccgttatcaacttgaaaaagtggcaccgagtcggtgctgaacaaattctgcaatccacactctgggcagtgtgtttt

SEQ ID NO: 2580 - RNA, 136 nt, synthetic construct
  source 1..136: mol_type = other RNA; note = pegRNA
tgcactcacactgcccagaggttttagagctagaaatagcaagttaaaataaggctagtccgttatcaacttgaaaaagtggcaccgagtcggtgctgaacaaattctgcaatccgcactctgggcagtgtgagtg

SEQ ID NO: 2581 - RNA, 136 nt, synthetic construct
  source 1..136: mol_type = other RNA; note = pegRNA
tgcactcacactgcccagaggttttagagctagaaatagcaagttaaaataaggctagtccgttatcaacttgaaaaagtggcaccgagtcggtgctgaacaaattctgcaatccgcactctgggcagtgtgtttt

SEQ ID NO: 2582 - RNA, 137 nt, synthetic construct
  source 1..137: mol_type = other RNA; note = pegRNA
tgcactcacactgcccagaggttttagagctagaaatagcaagttaaaataaggctagtccgttatcaacttgaaaaagtggcaccgagtcggtgcaacaaattctgcaatccacactctgggcagtgtgagttttt

SEQ ID NO: 2583 - RNA, 137 nt, synthetic construct
  source 1..137: mol_type = other RNA; note = pegRNA
tgcactcacactgcccagaggttttagagctagaaatagcaagttaaaataaggctagtccgttatcaacttgaaaaagtggcaccgagtcggtgcaacaaattctgcaatccgcactctgggcagtgtgagttttt

SEQ ID NO: 2584 - RNA, 137 nt, synthetic construct
  source 1..137: mol_type = other RNA; note = pegRNA
tgcactcacactgcccagaggttttagagctagaaatagcaagttaaaataaggctagtccgttatcaacttgaaaaagtggcaccgagtcggtgcaacaaattctgcaatcctcactctgggcagtgtgagttttt

SEQ ID NO: 2585 - RNA, 137 nt, synthetic construct
  source 1..137: mol_type = other RNA; note = pegRNA
tgcactcacactgcccagaggttttagagctagaaatagcaagttaaaataaggctagtccgttatcaacttgaaaaagtggcaccgagtcggtgcacaaattctgcaatccacactctgggcagtgtgagtgtttt

SEQ ID NO: 2586 - RNA, 137 nt, synthetic construct
  source 1..137: mol_type = other RNA; note = pegRNA
tgcactcacactgcccagaggttttagagctagaaatagcaagttaaaataaggctagtccgttatcaacttgaaaaagtggcaccgagtcggtgcacaaattctgcaatccgcactctgggcagtgtgagtgtttt

SEQ ID NO: 2587 - RNA, 137 nt, synthetic construct
  source 1..137: mol_type = other RNA; note = pegRNA
tgcactcacactgcccagaggttttagagctagaaatagcaagttaaaataaggctagtccgttatcaacttgaaaaagtggcaccgagtcggtgcagtgaacaaattctgcaatccacactctgggcagtgtgagt

SEQ ID NO: 2588 - RNA, 137 nt, synthetic construct
  source 1..137: mol_type = other RNA; note = pegRNA
tgcactcacactgcccagaggttttagagctagaaatagcaagttaaaataaggctagtccgttatcaacttgaaaaagtggcaccgagtcggtgcagtgaacaaattctgcaatccacactctgggcagtgttttt

SEQ ID NO: 2589 - RNA, 137 nt, synthetic construct
  source 1..137: mol_type = other RNA; note = pegRNA
tgcactcacactgcccagaggttttagagctagaaatagcaagttaaaataaggctagtccgttatcaacttgaaaaagtggcaccgagtcggtgcagtgaacaaattctgcaatccgcactctgggcagtgtgagt

SEQ ID NO: 2590 - RNA, 137 nt, synthetic construct
  source 1..137: mol_type = other RNA; note = pegRNA
tgcactcacactgcccagaggttttagagctagaaatagcaagttaaaataaggctagtccgttatcaacttgaaaaagtggcaccgagtcggtgcagtgaacaaattctgcaatccgcactctgggcagtgttttt

SEQ ID NO: 2591 - RNA, 137 nt, synthetic construct
  source 1..137: mol_type = other RNA; note = pegRNA
tgcactcacactgcccagaggttttagagctagaaatagcaagttaaaataaggctagtccgttatcaacttgaaaaagtggcaccgagtcggtgccaaattctgcaatccacactctgggcagtgtgagtgctttt

SEQ ID NO: 2592 - RNA, 137 nt, synthetic construct
  source 1..137: mol_type = other RNA; note = pegRNA
tgcactcacactgcccagaggttttagagctagaaatagcaagttaaaataaggctagtccgttatcaacttgaaaaagtggcaccgagtcggtgccaaattctgcaatccgcactctgggcagtgtgagtgctttt

SEQ ID NO: 2593 - RNA, 137 nt, synthetic construct
  source 1..137: mol_type = other RNA; note = pegRNA
tgcactcacactgcccagaggttttagagctagaaatagcaagttaaaataaggctagtccgttatcaacttgaaaaagtggcaccgagtcggtgccagtgaacaaattctgcaatccacactctgggcagtgtgag

SEQ ID NO: 2594 - RNA, 137 nt, synthetic construct
  source 1..137: mol_type = other RNA; note = pegRNA
tgcactcacactgcccagaggttttagagctagaaatagcaagttaaaataaggctagtccgttatcaacttgaaaaagtggcaccgagtcggtgccagtgaacaaattctgcaatccacactctgggcagtgtttt

SEQ ID NO: 2595 - RNA, 137 nt, synthetic construct
  source 1..137: mol_type = other RNA; note = pegRNA
tgcactcacactgcccagaggttttagagctagaaatagcaagttaaaataaggctagtccgttatcaacttgaaaaagtggcaccgagtcggtgccagtgaacaaattctgcaatccgcactctgggcagtgtgag

SEQ ID NO: 2596 - RNA, 137 nt, synthetic construct
  source 1..137: mol_type = other RNA; note = pegRNA
tgcactcacactgcccagaggttttagagctagaaatagcaagttaaaataaggctagtccgttatcaacttgaaaaagtggcaccgagtcggtgccagtgaacaaattctgcaatccgcactctgggcagtgtttt

SEQ ID NO: 2597 - RNA, 137 nt, synthetic construct
  source 1..137: mol_type = other RNA; note = pegRNA
tgcactcacactgcccagaggttttagagctagaaatagcaagttaaaataaggctagtccgttatcaacttgaaaaagtggcaccgagtcggtgcctcagtgaacaaattctgcaatccacactctgggcagtgtg

SEQ ID NO: 2598 - RNA, 137 nt, synthetic construct
  source 1..137: mol_type = other RNA; note = pegRNA
tgcactcacactgcccagaggttttagagctagaaatagcaagttaaaataaggctagtccgttatcaacttgaaaaagtggcaccgagtcggtgcctcagtgaacaaattctgcaatccgcactctgggcagtgtg

SEQ ID NO: 2599 - RNA, 137 nt, synthetic construct
  source 1..137: mol_type = other RNA; note = pegRNA
tgcactcacactgcccagaggttttagagctagaaatagcaagttaaaataaggctagtccgttatcaacttgaaaaagtggcaccgagtcggtgcgaacaaattctgcaatccacactctgggcagtgtgagtttt

SEQ ID NO: 2600 - RNA, 137 nt, synthetic construct
  source 1..137: mol_type = other RNA; note = pegRNA
tgcactcacactgcccagaggttttagagctagaaatagcaagttaaaataaggctagtccgttatcaacttgaaaaagtggcaccgagtcggtgcgaacaaattctgcaatccgcactctgggcagtgtgagtttt

SEQ ID NO: 2601 - RNA, 137 nt, synthetic construct
  source 1..137: mol_type = other RNA; note = pegRNA
tgcactcacactgcccagaggttttagagctagaaatagcaagttaaaataaggctagtccgttatcaacttgaaaaagtggcaccgagtcggtgcgctcagtgaacaaattctgcaatccacactctgggcagtgt

SEQ ID NO: 2602 - RNA, 137 nt, synthetic construct
  source 1..137: mol_type = other RNA; note = pegRNA
tgcactcacactgcccagaggttttagagctagaaatagcaagttaaaataaggctagtccgttatcaacttgaaaaagtggcaccgagtcggtgcgctcagtgaacaaattctgcaatccgcactctgggcagtgt

SEQ ID NO: 2603 - RNA, 137 nt, synthetic construct
  source 1..137: mol_type = other RNA; note = pegRNA
tgcactcacactgcccagaggttttagagctagaaatagcaagttaaaataaggctagtccgttatcaacttgaaaaagtggcaccgagtcggtgcggctcagtgaacaaattctgcaatccacactctgggcagtg

SEQ ID NO: 2604 - RNA, 137 nt, synthetic construct
  source 1..137: mol_type = other RNA; note = pegRNA
tgcactcacactgcccagaggttttagagctagaaatagcaagttaaaataaggctagtccgttatcaacttgaaaaagtggcaccgagtcggtgcggctcagtgaacaaattctgcaatccgcactctgggcagtg

SEQ ID NO: 2605 - RNA, 137 nt, synthetic construct
  source 1..137: mol_type = other RNA; note = pegRNA
tgcactcacactgcccagaggttttagagctagaaatagcaagttaaaataaggctagtccgttatcaacttgaaaaagtggcaccgagtcggtgcgtgaacaaattctgcaatccacactctgggcagtgtgagtg

SEQ ID NO: 2606 - RNA, 137 nt, synthetic construct
  source 1..137: mol_type = other RNA; note = pegRNA
tgcactcacactgcccagaggttttagagctagaaatagcaagttaaaataaggctagtccgttatcaacttgaaaaagtggcaccgagtcggtgcgtgaacaaattctgcaatccacactctgggcagtgtgtttt

SEQ ID NO: 2607 - RNA, 137 nt, synthetic construct
  source 1..137: mol_type = other RNA; note = pegRNA
tgcactcacactgcccagaggttttagagctagaaatagcaagttaaaataaggctagtccgttatcaacttgaaaaagtggcaccgagtcggtgcgtgaacaaattctgcaatccgcactctgggcagtgtgagtg

SEQ ID NO: 2608 - RNA, 137 nt, synthetic construct
  source 1..137: mol_type = other RNA; note = pegRNA
tgcactcacactgcccagaggttttagagctagaaatagcaagttaaaataaggctagtccgttatcaacttgaaaaagtggcaccgagtcggtgcgtgaacaaattctgcaatccgcactctgggcagtgtgtttt

SEQ ID NO: 2609 - RNA, 137 nt, synthetic construct
  source 1..137: mol_type = other RNA; note = pegRNA
tgcactcacactgcccagaggttttagagctagaaatagcaagttaaaataaggctagtccgttatcaacttgaaaaagtggcaccgagtcggtgctcagtgaacaaattctgcaatccacactctgggcagtgtga

SEQ ID NO: 2610 - RNA, 137 nt, synthetic construct
  source 1..137: mol_type = other RNA; note = pegRNA
tgcactcacactgcccagaggttttagagctagaaatagcaagttaaaataaggctagtccgttatcaacttgaaaaagtggcaccgagtcggtgctcagtgaacaaattctgcaatccacactctgggcagttttt

SEQ ID NO: 2611 - RNA, 137 nt, synthetic construct
  source 1..137: mol_type = other RNA; note = pegRNA
tgcactcacactgcccagaggttttagagctagaaatagcaagttaaaataaggctagtccgttatcaacttgaaaaagtggcaccgagtcggtgctcagtgaacaaattctgcaatccgcactctgggcagtgtga

SEQ ID NO: 2612 - RNA, 137 nt, synthetic construct
  source 1..137: mol_type = other RNA; note = pegRNA
tgcactcacactgcccagaggttttagagctagaaatagcaagttaaaataaggctagtccgttatcaacttgaaaaagtggcaccgagtcggtgctcagtgaacaaattctgcaatccgcactctgggcagttttt

SEQ ID NO: 2613 - RNA, 137 nt, synthetic construct
  source 1..137: mol_type = other RNA; note = pegRNA
tgcactcacactgcccagaggttttagagctagaaatagcaagttaaaataaggctagtccgttatcaacttgaaaaagtggcaccgagtcggtgctgaacaaattctgcaatccacactctgggcagtgtgagtgc

SEQ ID NO: 2614 - RNA, 137 nt, synthetic construct
  source 1..137: mol_type = other RNA; note = pegRNA
tgcactcacactgcccagaggttttagagctagaaatagcaagttaaaataaggctagtccgttatcaacttgaaaaagtggcaccgagtcggtgctgaacaaattctgcaatccacactctgggcagtgtgatttt

SEQ ID NO: 2615 - RNA, 137 nt, synthetic construct
  source 1..137: mol_type = other RNA; note = pegRNA
tgcactcacactgcccagaggttttagagctagaaatagcaagttaaaataaggctagtccgttatcaacttgaaaaagtggcaccgagtcggtgctgaacaaattctgcaatccgcactctgggcagtgtgagtgc

SEQ ID NO: 2616 - RNA, 137 nt, synthetic construct
  source 1..137: mol_type = other RNA; note = pegRNA
tgcactcacactgcccagaggttttagagctagaaatagcaagttaaaataaggctagtccgttatcaacttgaaaaagtggcaccgagtcggtgctgaacaaattctgcaatccgcactctgggcagtgtgatttt

SEQ ID NO: 2617 - RNA, 137 nt, synthetic construct
  source 1..137: mol_type = other RNA; note = pegRNA
tgcactcacactgcccagaggttttagagctagaaatagcaagttaaaataaggctagtccgttatcaacttgaaaaagtggcaccgagtcggtgctggctcagtgaacaaattctgcaatccacactctgggcagt

SEQ ID NO: 2618 - RNA, 137 nt, synthetic construct
  source 1..137: mol_type = other RNA; note = pegRNA
tgcactcacactgcccagaggttttagagctagaaatagcaagttaaaataaggctagtccgttatcaacttgaaaaagtggcaccgagtcggtgctggctcagtgaacaaattctgcaatccgcactctgggcagt

SEQ ID NO: 2619 - RNA, 138 nt, synthetic construct
  source 1..138: mol_type = other RNA; note = pegRNA
tgcactcacactgcccagaggttttagagctagaaatagcaagttaaaataaggctagtccgttatcaacttgaaaaagtggcaccgagtcggtgcaacaaattctgcaatccacactctgggcagtgtgagtgtttt

SEQ ID NO: 2620 - RNA, 138 nt, synthetic construct
  source 1..138: mol_type = other RNA; note = pegRNA
tgcactcacactgcccagaggttttagagctagaaatagcaagttaaaataaggctagtccgttatcaacttgaaaaagtggcaccgagtcggtgcaacaaattctgcaatccgcactctgggcagtgtgagtgtttt

SEQ ID NO: 2621 - RNA, 138 nt, synthetic construct
  source 1..138: mol_type = other RNA; note = pegRNA
tgcactcacactgcccagaggttttagagctagaaatagcaagttaaaataaggctagtccgttatcaacttgaaaaagtggcaccgagtcggtgcacaaattctgcaatccacactctgggcagtgtgagtgctttt

SEQ ID NO: 2622 - RNA, 138 nt, synthetic construct
  source 1..138: mol_type = other RNA; note = pegRNA
tgcactcacactgcccagaggttttagagctagaaatagcaagttaaaataaggctagtccgttatcaacttgaaaaagtggcaccgagtcggtgcacaaattctgcaatccgcactctgggcagtgtgagtgctttt

SEQ ID NO: 2623 - RNA, 138 nt, synthetic construct
  source 1..138: mol_type = other RNA; note = pegRNA
tgcactcacactgcccagaggttttagagctagaaatagcaagttaaaataaggctagtccgttatcaacttgaaaaagtggcaccgagtcggtgcagtgaacaaattctgcaatccacactctgggcagtgtgagtg

SEQ ID NO: 2624 - RNA, 138 nt, synthetic construct
  source 1..138: mol_type = other RNA; note = pegRNA
tgcactcacactgcccagaggttttagagctagaaatagcaagttaaaataaggctagtccgttatcaacttgaaaaagtggcaccgagtcggtgcagtgaacaaattctgcaatccacactctgggcagtgtgtttt

SEQ ID NO: 2625 - RNA, 138 nt, synthetic construct
  source 1..138: mol_type = other RNA; note = pegRNA
tgcactcacactgcccagaggttttagagctagaaatagcaagttaaaataaggctagtccgttatcaacttgaaaaagtggcaccgagtcggtgcagtgaacaaattctgcaatccgcactctgggcagtgtgagtg

SEQ ID NO: 2626 - RNA, 138 nt, synthetic construct
  source 1..138: mol_type = other RNA; note = pegRNA
tgcactcacactgcccagaggttttagagctagaaatagcaagttaaaataaggctagtccgttatcaacttgaaaaagtggcaccgagtcggtgcagtgaacaaattctgcaatccgcactctgggcagtgtgtttt

SEQ ID NO: 2627 - RNA, 138 nt, synthetic construct
  source 1..138: mol_type = other RNA; note = pegRNA
tgcactcacactgcccagaggttttagagctagaaatagcaagttaaaataaggctagtccgttatcaacttgaaaaagtggcaccgagtcggtgcatggctcagtgaacaaattctgcaatccacactctgggcagt

SEQ ID NO: 2628 - RNA, 138 nt, synthetic construct
  source 1..138: mol_type = other RNA; note = pegRNA
tgcactcacactgcccagaggttttagagctagaaatagcaagttaaaataaggctagtccgttatcaacttgaaaaagtggcaccgagtcggtgcatggctcagtgaacaaattctgcaatccgcactctgggcagt

SEQ ID NO: 2629 - RNA, 138 nt, synthetic construct
  source 1..138: mol_type = other RNA; note = pegRNA
tgcactcacactgcccagaggttttagagctagaaatagcaagttaaaataaggctagtccgttatcaacttgaaaaagtggcaccgagtcggtgccagtgaacaaattctgcaatccacactctgggcagtgtgagt

SEQ ID NO: 2630 - RNA, 138 nt, synthetic construct
  source 1..138: mol_type = other RNA; note = pegRNA
tgcactcacactgcccagaggttttagagctagaaatagcaagttaaaataaggctagtccgttatcaacttgaaaaagtggcaccgagtcggtgccagtgaacaaattctgcaatccacactctgggcagtgttttt

SEQ ID NO: 2631 - RNA, 138 nt, synthetic construct
  source 1..138: mol_type = other RNA; note = pegRNA
tgcactcacactgcccagaggttttagagctagaaatagcaagttaaaataaggctagtccgttatcaacttgaaaaagtggcaccgagtcggtgccagtgaacaaattctgcaatccgcactctgggcagtgtgagt

SEQ ID NO: 2632 - RNA, 138 nt, synthetic construct
  source 1..138: mol_type = other RNA; note = pegRNA
tgcactcacactgcccagaggttttagagctagaaatagcaagttaaaataaggctagtccgttatcaacttgaaaaagtggcaccgagtcggtgccagtgaacaaattctgcaatccgcactctgggcagtgttttt

SEQ ID NO: 2633 - RNA, 138 nt, synthetic construct
  source 1..138: mol_type = other RNA; note = pegRNA
tgcactcacactgcccagaggttttagagctagaaatagcaagttaaaataaggctagtccgttatcaacttgaaaaagtggcaccgagtcggtgcctcagtgaacaaattctgcaatccacactctgggcagtgtga

SEQ ID NO: 2634 - RNA, 138 nt, synthetic construct
  source 1..138: mol_type = other RNA; note = pegRNA
tgcactcacactgcccagaggttttagagctagaaatagcaagttaaaataaggctagtccgttatcaacttgaaaaagtggcaccgagtcggtgcctcagtgaacaaattctgcaatccacactctgggcagttttt

SEQ ID NO: 2635 - RNA, 138 nt, synthetic construct
  source 1..138: mol_type = other RNA; note = pegRNA
tgcactcacactgcccagaggttttagagctagaaatagcaagttaaaataaggctagtccgttatcaacttgaaaaagtggcaccgagtcggtgcctcagtgaacaaattctgcaatccgcactctgggcagtgtga

SEQ ID NO: 2636 - RNA, 138 nt, synthetic construct
  source 1..138: mol_type = other RNA; note = pegRNA
tgcactcacactgcccagaggttttagagctagaaatagcaagttaaaataaggctagtccgttatcaacttgaaaaagtggcaccgagtcggtgcctcagtgaacaaattctgcaatccgcactctgggcagttttt

SEQ ID NO: 2637 - RNA, 138 nt, synthetic construct
  source 1..138: mol_type = other RNA; note = pegRNA
tgcactcacactgcccagaggttttagagctagaaatagcaagttaaaataaggctagtccgttatcaacttgaaaaagtggcaccgagtcggtgcgaacaaattctgcaatccacactctgggcagtgtgagttttt

SEQ ID NO: 2638 - RNA, 138 nt, synthetic construct
  source 1..138: mol_type = other RNA; note = pegRNA
tgcactcacactgcccagaggttttagagctagaaatagcaagttaaaataaggctagtccgttatcaacttgaaaaagtggcaccgagtcggtgcgaacaaattctgcaatccgcactctgggcagtgtgagttttt

SEQ ID NO: 2639 - RNA, 138 nt, synthetic construct
  source 1..138: mol_type = other RNA; note = pegRNA
tgcactcacactgcccagaggttttagagctagaaatagcaagttaaaataaggctagtccgttatcaacttgaaaaagtggcaccgagtcggtgcgctcagtgaacaaattctgcaatccacactctgggcagtgtg

SEQ ID NO: 2640 - RNA, 138 nt, synthetic construct
  source 1..138: mol_type = other RNA; note = pegRNA
tgcactcacactgcccagaggttttagagctagaaatagcaagttaaaataaggctagtccgttatcaacttgaaaaagtggcaccgagtcggtgcgctcagtgaacaaattctgcaatccgcactctgggcagtgtg

SEQ ID NO: 2641 - RNA, 138 nt, synthetic construct
  source 1..138: mol_type = other RNA; note = pegRNA
tgcactcacactgcccagaggttttagagctagaaatagcaagttaaaataaggctagtccgttatcaacttgaaaaagtggcaccgagtcggtgcggctcagtgaacaaattctgcaatccacactctgggcagtgt

SEQ ID NO: 2642 - RNA, 138 nt, synthetic construct
  source 1..138: mol_type = other RNA; note = pegRNA
tgcactcacactgcccagaggttttagagctagaaatagcaagttaaaataaggctagtccgttatcaacttgaaaaagtggcaccgagtcggtgcggctcagtgaacaaattctgcaatccgcactctgggcagtgt

SEQ ID NO: 2643 - RNA, 138 nt, synthetic construct
  source 1..138: mol_type = other RNA; note = pegRNA
tgcactcacactgcccagaggttttagagctagaaatagcaagttaaaataaggctagtccgttatcaacttgaaaaagtggcaccgagtcggtgcgtgaacaaattctgcaatccacactctgggcagtgtgagtgc

SEQ ID NO: 2644 - RNA, 138 nt, synthetic construct
  source 1..138: mol_type = other RNA; note = pegRNA
tgcactcacactgcccagaggttttagagctagaaatagcaagttaaaataaggctagtccgttatcaacttgaaaaagtggcaccgagtcggtgcgtgaacaaattctgcaatccacactctgggcagtgtgatttt

SEQ ID NO: 2645 - RNA, 138 nt, synthetic construct
  source 1..138: mol_type = other RNA; note = pegRNA
tgcactcacactgcccagaggttttagagctagaaatagcaagttaaaataaggctagtccgttatcaacttgaaaaagtggcaccgagtcggtgcgtgaacaaattctgcaatccgcactctgggcagtgtgagtgc

SEQ ID NO: 2646 - RNA, 138 nt, synthetic construct
  source 1..138: mol_type = other RNA; note = pegRNA
tgcactcacactgcccagaggttttagagctagaaatagcaagttaaaataaggctagtccgttatcaacttgaaaaagtggcaccgagtcggtgcgtgaacaaattctgcaatccgcactctgggcagtgtgatttt

SEQ ID NO: 2647 - RNA, 138 nt, synthetic construct
  source 1..138: mol_type = other RNA; note = pegRNA
tgcactcacactgcccagaggttttagagctagaaatagcaagttaaaataaggctagtccgttatcaacttgaaaaagtggcaccgagtcggtgctcagtgaacaaattctgcaatccacactctgggcagtgtgag

SEQ ID NO: 2648 - RNA, 138 nt, synthetic construct
  source 1..138: mol_type = other RNA; note = pegRNA
tgcactcacactgcccagaggttttagagctagaaatagcaagttaaaataaggctagtccgttatcaacttgaaaaagtggcaccgagtcggtgctcagtgaacaaattctgcaatccacactctgggcagtgtttt

SEQ ID NO: 2649 - RNA, 138 nt, synthetic construct
  source 1..138: mol_type = other RNA; note = pegRNA
tgcactcacactgcccagaggttttagagctagaaatagcaagttaaaataaggctagtccgttatcaacttgaaaaagtggcaccgagtcggtgctcagtgaacaaattctgcaatccgcactctgggcagtgtgag

SEQ ID NO: 2650 - RNA, 138 nt, synthetic construct
  source 1..138: mol_type = other RNA; note = pegRNA
tgcactcacactgcccagaggttttagagctagaaatagcaagttaaaataaggctagtccgttatcaacttgaaaaagtggcaccgagtcggtgctcagtgaacaaattctgcaatccgcactctgggcagtgtttt

SEQ ID NO: 2651 - RNA, 138 nt, synthetic construct
  source 1..138: mol_type = other RNA; note = pegRNA
tgcactcacactgcccagaggttttagagctagaaatagcaagttaaaataaggctagtccgttatcaacttgaaaaagtggcaccgagtcggtgctgaacaaattctgcaatccacactctgggcagtgtgagtttt

SEQ ID NO: 2652 - RNA, 138 nt, synthetic construct
  source 1..138: mol_type = other RNA; note = pegRNA
tgcactcacactgcccagaggttttagagctagaaatagcaagttaaaataaggctagtccgttatcaacttgaaaaagtggcaccgagtcggtgctgaacaaattctgcaatccgcactctgggcagtgtgagtttt

SEQ ID NO: 2653 - RNA, 138 nt, synthetic construct
  source 1..138: mol_type = other RNA; note = pegRNA
tgcactcacactgcccagaggttttagagctagaaatagcaagttaaaataaggctagtccgttatcaacttgaaaaagtggcaccgagtcggtgctggctcagtgaacaaattctgcaatccacactctgggcagtg

SEQ ID NO: 2654 - RNA, 138 nt, synthetic construct
  source 1..138: mol_type = other RNA; note = pegRNA
tgcactcacactgcccagaggttttagagctagaaatagcaagttaaaataaggctagtccgttatcaacttgaaaaagtggcaccgagtcggtgctggctcagtgaacaaattctgcaatccgcactctgggcagtg

SEQ ID NO: 2655 - RNA, 139 nt, synthetic construct
  source 1..139: mol_type = other RNA; note = pegRNA
tgcactcacactgcccagaggttttagagctagaaatagcaagttaaaataaggctagtccgttatcaacttgaaaaagtggcaccgagtcggtgcaacaaattctgcaatccacactctgggcagtgtgagtgctttt

SEQ ID NO: 2656 - RNA, 139 nt, synthetic construct
  source 1..139: mol_type = other RNA; note = pegRNA
tgcactcacactgcccagaggttttagagctagaaatagcaagttaaaataaggctagtccgttatcaacttgaaaaagtggcaccgagtcggtgcaacaaattctgcaatccgcactctgggcagtgtgagtgctttt

SEQ ID NO: 2657 - RNA, 139 nt, synthetic construct
  source 1..139: mol_type = other RNA; note = pegRNA
tgcactcacactgcccagaggttttagagctagaaatagcaagttaaaataaggctagtccgttatcaacttgaaaaagtggcaccgagtcggtgcagtgaacaaattctgcaatccacactctgggcagtgtgagtgc

SEQ ID NO: 2658 - RNA, 139 nt, synthetic construct
  source 1..139: mol_type = other RNA; note = pegRNA
tgcactcacactgcccagaggttttagagctagaaatagcaagttaaaataaggctagtccgttatcaacttgaaaaagtggcaccgagtcggtgcagtgaacaaattctgcaatccacactctgggcagtgtgatttt

SEQ ID NO: 2659 - RNA, 139 nt, synthetic construct
  source 1..139: mol_type = other RNA; note = pegRNA
tgcactcacactgcccagaggttttagagctagaaatagcaagttaaaataaggctagtccgttatcaacttgaaaaagtggcaccgagtcggtgcagtgaacaaattctgcaatccgcactctgggcagtgtgagtgc

SEQ ID NO: 2660 - RNA, 139 nt, synthetic construct
  source 1..139: mol_type = other RNA; note = pegRNA
tgcactcacactgcccagaggttttagagctagaaatagcaagttaaaataaggctagtccgttatcaacttgaaaaagtggcaccgagtcggtgcagtgaacaaattctgcaatccgcactctgggcagtgtgatttt

SEQ ID NO: 2661 - RNA, 139 nt, synthetic construct
  source 1..139: mol_type = other RNA; note = pegRNA
tgcactcacactgcccagaggttttagagctagaaatagcaagttaaaataaggctagtccgttatcaacttgaaaaagtggcaccgagtcggtgcatggctcagtgaacaaattctgcaatccacactctgggcagtg

SEQ ID NO: 2662 - RNA, 139 nt, synthetic construct
  source 1..139: mol_type = other RNA; note = pegRNA
tgcactcacactgcccagaggttttagagctagaaatagcaagttaaaataaggctagtccgttatcaacttgaaaaagtggcaccgagtcggtgcatggctcagtgaacaaattctgcaatccgcactctgggcagtg

SEQ ID NO: 2663 - RNA, 139 nt, synthetic construct
  source 1..139: mol_type = other RNA; note = pegRNA
tgcactcacactgcccagaggttttagagctagaaatagcaagttaaaataaggctagtccgttatcaacttgaaaaagtggcaccgagtcggtgccagtgaacaaattctgcaatccacactctgggcagtgtgagtg

SEQ ID NO: 2664 - RNA, 139 nt, synthetic construct
  source 1..139: mol_type = other RNA; note = pegRNA
tgcactcacactgcccagaggttttagagctagaaatagcaagttaaaataaggctagtccgttatcaacttgaaaaagtggcaccgagtcggtgccagtgaacaaattctgcaatccacactctgggcagtgtgtttt

SEQ ID NO: 2665 - RNA, 139 nt, synthetic construct
  source 1..139: mol_type = other RNA; note = pegRNA
tgcactcacactgcccagaggttttagagctagaaatagcaagttaaaataaggctagtccgttatcaacttgaaaaagtggcaccgagtcggtgccagtgaacaaattctgcaatccgcactctgggcagtgtgagtg

SEQ ID NO: 2666 - RNA, 139 nt, synthetic construct
  source 1..139: mol_type = other RNA; note = pegRNA
tgcactcacactgcccagaggttttagagctagaaatagcaagttaaaataaggctagtccgttatcaacttgaaaaagtggcaccgagtcggtgccagtgaacaaattctgcaatccgcactctgggcagtgtgtttt

SEQ ID NO: 2667 - RNA, 139 nt, synthetic construct
  source 1..139: mol_type = other RNA; note = pegRNA
tgcactcacactgcccagaggttttagagctagaaatagcaagttaaaataaggctagtccgttatcaacttgaaaaagtggcaccgagtcggtgccatggctcagtgaacaaattctgcaatccacactctgggcagt

SEQ ID NO: 2668 - RNA, 139 nt, synthetic construct
  source 1..139: mol_type = other RNA; note = pegRNA
tgcactcacactgcccagaggttttagagctagaaatagcaagttaaaataaggctagtccgttatcaacttgaaaaagtggcaccgagtcggtgccatggctcagtgaacaaattctgcaatccgcactctgggcagt

SEQ ID NO: 2669 - RNA, 139 nt, synthetic construct
  source 1..139: mol_type = other RNA; note = pegRNA
tgcactcacactgcccagaggttttagagctagaaatagcaagttaaaataaggctagtccgttatcaacttgaaaaagtggcaccgagtcggtgcctcagtgaacaaattctgcaatccacactctgggcagtgtgag

SEQ ID NO: 2670 - RNA, 139 nt, synthetic construct
  source 1..139: mol_type = other RNA; note = pegRNA
tgcactcacactgcccagaggttttagagctagaaatagcaagttaaaataaggctagtccgttatcaacttgaaaaagtggcaccgagtcggtgcctcagtgaacaaattctgcaatccacactctgggcagtgtttt

SEQ ID NO: 2671 - RNA, 139 nt, synthetic construct
  source 1..139: mol_type = other RNA; note = pegRNA
tgcactcacactgcccagaggttttagagctagaaatagcaagttaaaataaggctagtccgttatcaacttgaaaaagtggcaccgagtcggtgcctcagtgaacaaattctgcaatccgcactctgggcagtgtgag

SEQ ID NO: 2672 - RNA, 139 nt, synthetic construct
  source 1..139: mol_type = other RNA; note = pegRNA
tgcactcacactgcccagaggttttagagctagaaatagcaagttaaaataaggctagtccgttatcaacttgaaaaagtggcaccgagtcggtgcctcagtgaacaaattctgcaatccgcactctgggcagtgtttt

SEQ ID NO: 2673 - RNA, 139 nt, synthetic construct
  source 1..139: mol_type = other RNA; note = pegRNA
tgcactcacactgcccagaggttttagagctagaaatagcaagttaaaataaggctagtccgttatcaacttgaaaaagtggcaccgagtcggtgcgaacaaattctgcaatccacactctgggcagtgtgagtgtttt

SEQ ID NO: 2674 - RNA, 139 nt, synthetic construct
  source 1..139: mol_type = other RNA; note = pegRNA
tgcactcacactgcccagaggttttagagctagaaatagcaagttaaaataaggctagtccgttatcaacttgaaaaagtggcaccgagtcggtgcgaacaaattctgcaatccgcactctgggcagtgtgagtgtttt

SEQ ID NO: 2675 - RNA, 139 nt, synthetic construct
  source 1..139: mol_type = other RNA; note = pegRNA
tgcactcacactgcccagaggttttagagctagaaatagcaagttaaaataaggctagtccgttatcaacttgaaaaagtggcaccgagtcggtgcgctcagtgaacaaattctgcaatccacactctgggcagtgtga

SEQ ID NO: 2676 - RNA, 139 nt, synthetic construct
  source 1..139: mol_type = other RNA; note = pegRNA
tgcactcacactgcccagaggttttagagctagaaatagcaagttaaaataaggctagtccgttatcaacttgaaaaagtggcaccgagtcggtgcgctcagtgaacaaattctgcaatccacactctgggcagttttt

SEQ ID NO: 2677 - RNA, 139 nt, synthetic construct
  source 1..139: mol_type = other RNA; note = pegRNA
tgcactcacactgcccagaggttttagagctagaaatagcaagttaaaataaggctagtccgttatcaacttgaaaaagtggcaccgagtcggtgcgctcagtgaacaaattctgcaatccgcactctgggcagtgtga

SEQ ID NO: 2678 - RNA, 139 nt, synthetic construct
  source 1..139: mol_type = other RNA; note = pegRNA
tgcactcacactgcccagaggttttagagctagaaatagcaagttaaaataaggctagtccgttatcaacttgaaaaagtggcaccgagtcggtgcgctcagtgaacaaattctgcaatccgcactctgggcagttttt

SEQ ID NO: 2679 - RNA, 139 nt, synthetic construct
  source 1..139: mol_type = other RNA; note = pegRNA
tgcactcacactgcccagaggttttagagctagaaatagcaagttaaaataaggctagtccgttatcaacttgaaaaagtggcaccgagtcggtgcggctcagtgaacaaattctgcaatccacactctgggcagtgtg

SEQ ID NO: 2680 - RNA, 139 nt, synthetic construct
  source 1..139: mol_type = other RNA; note = pegRNA
tgcactcacactgcccagaggttttagagctagaaatagcaagttaaaataaggctagtccgttatcaacttgaaaaagtggcaccgagtcggtgcggctcagtgaacaaattctgcaatccgcactctgggcagtgtg

SEQ ID NO: 2681 - RNA, 139 nt, synthetic construct
  source 1..139: mol_type = other RNA; note = pegRNA
tgcactcacactgcccagaggttttagagctagaaatagcaagttaaaataaggctagtccgttatcaacttgaaaaagtggcaccgagtcggtgcgtgaacaaattctgcaatccacactctgggcagtgtgagtttt

SEQ ID NO: 2682 - RNA, 139 nt, synthetic construct
  source 1..139: mol_type = other RNA; note = pegRNA
tgcactcacactgcccagaggttttagagctagaaatagcaagttaaaataaggctagtccgttatcaacttgaaaaagtggcaccgagtcggtgcgtgaacaaattctgcaatccgcactctgggcagtgtgagtttt

SEQ ID NO: 2683 - RNA, 139 nt, synthetic construct
  source 1..139: mol_type = other RNA; note = pegRNA
tgcactcacactgcccagaggttttagagctagaaatagcaagttaaaataaggctagtccgttatcaacttgaaaaagtggcaccgagtcggtgctcagtgaacaaattctgcaatccacactctgggcagtgtgagt

SEQ ID NO: 2684 - RNA, 139 nt, synthetic construct
  source 1..139: mol_type = other RNA; note = pegRNA
tgcactcacactgcccagaggttttagagctagaaatagcaagttaaaataaggctagtccgttatcaacttgaaaaagtggcaccgagtcggtgctcagtgaacaaattctgcaatccacactctgggcagtgttttt

SEQ ID NO: 2685 - RNA, 139 nt, synthetic construct
  source 1..139: mol_type = other RNA; note = pegRNA
tgcactcacactgcccagaggttttagagctagaaatagcaagttaaaataaggctagtccgttatcaacttgaaaaagtggcaccgagtcggtgctcagtgaacaaattctgcaatccgcactctgggcagtgtgagt

SEQ ID NO: 2686 - RNA, 139 nt, synthetic construct
  source 1..139: mol_type = other RNA; note = pegRNA
tgcactcacactgcccagaggttttagagctagaaatagcaagttaaaataaggctagtccgttatcaacttgaaaaagtggcaccgagtcggtgctcagtgaacaaattctgcaatccgcactctgggcagtgttttt

SEQ ID NO: 2687 - RNA, 139 nt, synthetic construct
  source 1..139: mol_type = other RNA; note = pegRNA
tgcactcacactgcccagaggttttagagctagaaatagcaagttaaaataaggctagtccgttatcaacttgaaaaagtggcaccgagtcggtgctgaacaaattctgcaatccacactctgggcagtgtgagttttt

SEQ ID NO: 2688 - RNA, 139 nt, synthetic construct
  source 1..139: mol_type = other RNA; note = pegRNA
tgcactcacactgcccagaggttttagagctagaaatagcaagttaaaataaggctagtccgttatcaacttgaaaaagtggcaccgagtcggtgctgaacaaattctgcaatccgcactctgggcagtgtgagttttt

SEQ ID NO: 2689 - RNA, 139 nt, synthetic construct
  source 1..139: mol_type = other RNA; note = pegRNA
tgcactcacactgcccagaggttttagagctagaaatagcaagttaaaataaggctagtccgttatcaacttgaaaaagtggcaccgagtcggtgctggctcagtgaacaaattctgcaatccacactctgggcagtgt

SEQ ID NO: 2690 - RNA, 139 nt, synthetic construct
  source 1..139: mol_type = other RNA; note = pegRNA
tgcactcacactgcccagaggttttagagctagaaatagcaagttaaaataaggctagtccgttatcaacttgaaaaagtggcaccgagtcggtgctggctcagtgaacaaattctgcaatccgcactctgggcagtgt

SEQ ID NO: 2691 - RNA, 140 nt, synthetic construct
  source 1..140: mol_type = other RNA; note = pegRNA
tgcactcacactgcccagaggttttagagctagaaatagcaagttaaaataaggctagtccgttatcaacttgaaaaagtggcaccgagtcggtgcagtgaacaaattctgcaatccacactctgggcagtgtgagtttt

SEQ ID NO: 2692 - RNA, 140 nt, synthetic construct
  source 1..140: mol_type = other RNA; note = pegRNA
tgcactcacactgcccagaggttttagagctagaaatagcaagttaaaataaggctagtccgttatcaacttgaaaaagtggcaccgagtcggtgcagtgaacaaattctgcaatccgcactctgggcagtgtgagtttt

SEQ ID NO: 2693 - RNA, 140 nt, synthetic construct
  source 1..140: mol_type = other RNA; note = pegRNA
tgcactcacactgcccagaggttttagagctagaaatagcaagttaaaataaggctagtccgttatcaacttgaaaaagtggcaccgagtcggtgcatggctcagtgaacaaattctgcaatccacactctgggcagtgt

SEQ ID NO: 2694 - RNA, 140 nt, synthetic construct
  source 1..140: mol_type = other RNA; note = pegRNA
tgcactcacactgcccagaggttttagagctagaaatagcaagttaaaataaggctagtccgttatcaacttgaaaaagtggcaccgagtcggtgcatggctcagtgaacaaattctgcaatccgcactctgggcagtgt

SEQ ID NO: 2695 - RNA, 140 nt, synthetic construct
  source 1..140: mol_type = other RNA; note = pegRNA
tgcactcacactgcccagaggttttagagctagaaatagcaagttaaaataaggctagtccgttatcaacttgaaaaagtggcaccgagtcggtgccagtgaacaaattctgcaatccacactctgggcagtgtgagtgc

SEQ ID NO: 2696 - RNA, 140 nt, synthetic construct
  source 1..140: mol_type = other RNA; note = pegRNA
tgcactcacactgcccagaggttttagagctagaaatagcaagttaaaataaggctagtccgttatcaacttgaaaaagtggcaccgagtcggtgccagtgaacaaattctgcaatccacactctgggcagtgtgatttt

SEQ ID NO: 2697 - RNA, 140 nt, synthetic construct
  source 1..140: mol_type = other RNA; note = pegRNA
tgcactcacactgcccagaggttttagagctagaaatagcaagttaaaataaggctagtccgttatcaacttgaaaaagtggcaccgagtcggtgccagtgaacaaattctgcaatccgcactctgggcagtgtgagtgc

SEQ ID NO: 2698 - RNA, 140 nt, synthetic construct
  source 1..140: mol_type = other RNA; note = pegRNA
tgcactcacactgcccagaggttttagagctagaaatagcaagttaaaataaggctagtccgttatcaacttgaaaaagtggcaccgagtcggtgccagtgaacaaattctgcaatccgcactctgggcagtgtgatttt

SEQ ID NO: 2699 - RNA, 140 nt, synthetic construct
  source 1..140: mol_type = other RNA; note = pegRNA
tgcactcacactgcccagaggttttagagctagaaatagcaagttaaaataaggctagtccgttatcaacttgaaaaagtggcaccgagtcggtgccatggctcagtgaacaaattctgcaatccacactctgggcagtg

SEQ ID NO: 2700 - RNA, 140 nt, synthetic construct
  source 1..140: mol_type = other RNA; note = pegRNA
tgcactcacactgcccagaggttttagagctagaaatagcaagttaaaataaggctagtccgttatcaacttgaaaaagtggcaccgagtcggtgccatggctcagtgaacaaattctgcaatccgcactctgggcagtg

SEQ ID NO: 2701 - RNA, 140 nt, synthetic construct
  source 1..140: mol_type = other RNA; note = pegRNA
tgcactcacactgcccagaggttttagagctagaaatagcaagttaaaataaggctagtccgttatcaacttgaaaaagtggcaccgagtcggtgcccatggctcagtgaacaaattctgcaatccacactctgggcagt

SEQ ID NO: 2702 - RNA, 140 nt, synthetic construct
  source 1..140: mol_type = other RNA; note = pegRNA
tgcactcacactgcccagaggttttagagctagaaatagcaagttaaaataaggctagtccgttatcaacttgaaaaagtggcaccgagtcggtgcccatggctcagtgaacaaattctgcaatccgcactctgggcagt

SEQ ID NO: 2703 - RNA, 140 nt, synthetic construct
  source 1..140: mol_type = other RNA; note = pegRNA
tgcactcacactgcccagaggttttagagctagaaatagcaagttaaaataaggctagtccgttatcaacttgaaaaagtggcaccgagtcggtgcctcagtgaacaaattctgcaatccacactctgggcagtgtgagt

SEQ ID NO: 2704 - RNA, 140 nt, synthetic construct
  source 1..140: mol_type = other RNA; note = pegRNA
tgcactcacactgcccagaggttttagagctagaaatagcaagttaaaataaggctagtccgttatcaacttgaaaaagtggcaccgagtcggtgcctcagtgaacaaattctgcaatccacactctgggcagtgttttt

SEQ ID NO: 2705 - RNA, 140 nt, synthetic construct
  source 1..140: mol_type = other RNA; note = pegRNA
tgcactcacactgcccagaggttttagagctagaaatagcaagttaaaataaggctagtccgttatcaacttgaaaaagtggcaccgagtcggtgcctcagtgaacaaattctgcaatccgcactctgggcagtgtgagt

SEQ ID NO: 2706 - RNA, 140 nt, synthetic construct
  source 1..140: mol_type = other RNA; note = pegRNA
tgcactcacactgcccagaggttttagagctagaaatagcaagttaaaataaggctagtccgttatcaacttgaaaaagtggcaccgagtcggtgcctcagtgaacaaattctgcaatccgcactctgggcagtgttttt

SEQ ID NO: 2707 - RNA, 140 nt, synthetic construct
  source 1..140: mol_type = other RNA; note = pegRNA
tgcactcacactgcccagaggttttagagctagaaatagcaagttaaaataaggctagtccgttatcaacttgaaaaagtggcaccgagtcggtgcgaacaaattctgcaatccacactctgggcagtgtgagtgctttt

SEQ ID NO: 2708 - RNA, 140 nt, synthetic construct
  source 1..140: mol_type = other RNA; note = pegRNA
tgcactcacactgcccagaggttttagagctagaaatagcaagttaaaataaggctagtccgttatcaacttgaaaaagtggcaccgagtcggtgcgaacaaattctgcaatccgcactctgggcagtgtgagtgctttt

SEQ ID NO: 2709 - RNA, 140 nt, synthetic construct
  source 1..140: mol_type = other RNA; note = pegRNA
tgcactcacactgcccagaggttttagagctagaaatagcaagttaaaataaggctagtccgttatcaacttgaaaaagtggcaccgagtcggtgcgctcagtgaacaaattctgcaatccacactctgggcagtgtgag

SEQ ID NO: 2710 - RNA, 140 nt, synthetic construct
  source 1..140: mol_type = other RNA; note = pegRNA
tgcactcacactgcccagaggttttagagctagaaatagcaagttaaaataaggctagtccgttatcaacttgaaaaagtggcaccgagtcggtgcgctcagtgaacaaattctgcaatccacactctgggcagtgtttt

SEQ ID NO: 2711 - RNA, 140 nt, synthetic construct
  source 1..140: mol_type = other RNA; note = pegRNA
tgcactcacactgcccagaggttttagagctagaaatagcaagttaaaataaggctagtccgttatcaacttgaaaaagtggcaccgagtcggtgcgctcagtgaacaaattctgcaatccgcactctgggcagtgtgag

SEQ ID NO: 2712 - RNA, 140 nt, synthetic construct
  source 1..140: mol_type = other RNA; note = pegRNA
tgcactcacactgcccagaggttttagagctagaaatagcaagttaaaataaggctagtccgttatcaacttgaaaaagtggcaccgagtcggtgcgctcagtgaacaaattctgcaatccgcactctgggcagtgtttt

SEQ ID NO: 2713 - RNA, 140 nt, synthetic construct
  source 1..140: mol_type = other RNA; note = pegRNA
tgcactcacactgcccagaggttttagagctagaaatagcaagttaaaataaggctagtccgttatcaacttgaaaaagtggcaccgagtcggtgcggctcagtgaacaaattctgcaatccacactctgggcagtgtga

SEQ ID NO: 2714 - RNA, 140 nt, synthetic construct
  source 1..140: mol_type = other RNA; note = pegRNA
tgcactcacactgcccagaggttttagagctagaaatagcaagttaaaataaggctagtccgttatcaacttgaaaaagtggcaccgagtcggtgcggctcagtgaacaaattctgcaatccacactctgggcagttttt

SEQ ID NO: 2715 - RNA, 140 nt, synthetic construct
  source 1..140: mol_type = other RNA; note = pegRNA
tgcactcacactgcccagaggttttagagctagaaatagcaagttaaaataaggctagtccgttatcaacttgaaaaagtggcaccgagtcggtgcggctcagtgaacaaattctgcaatccgcactctgggcagtgtga

SEQ ID NO: 2716 - RNA, 140 nt, synthetic construct
  source 1..140: mol_type = other RNA; note = pegRNA
tgcactcacactgcccagaggttttagagctagaaatagcaagttaaaataaggctagtccgttatcaacttgaaaaagtggcaccgagtcggtgcggctcagtgaacaaattctgcaatccgcactctgggcagttttt

SEQ ID NO: 2717 - RNA, 140 nt, synthetic construct
  source 1..140: mol_type = other RNA; note = pegRNA
tgcactcacactgcccagaggttttagagctagaaatagcaagttaaaataaggctagtccgttatcaacttgaaaaagtggcaccgagtcggtgcgtgaacaaattctgcaatccacactctgggcagtgtgagttttt

SEQ ID NO: 2718 - RNA, 140 nt, synthetic construct
  source 1..140: mol_type = other RNA; note = pegRNA
tgcactcacactgcccagaggttttagagctagaaatagcaagttaaaataaggctagtccgttatcaacttgaaaaagtggcaccgagtcggtgcgtgaacaaattctgcaatccgcactctgggcagtgtgagttttt

SEQ ID NO: 2719 - RNA, 140 nt, synthetic construct
  source 1..140: mol_type = other RNA; note = pegRNA
tgcactcacactgcccagaggttttagagctagaaatagcaagttaaaataaggctagtccgttatcaacttgaaaaagtggcaccgagtcggtgctcagtgaacaaattctgcaatccacactctgggcagtgtgagtg

SEQ ID NO: 2720 - RNA, 140 nt, synthetic construct
  source 1..140: mol_type = other RNA; note = pegRNA
tgcactcacactgcccagaggttttagagctagaaatagcaagttaaaataaggctagtccgttatcaacttgaaaaagtggcaccgagtcggtgctcagtgaacaaattctgcaatccacactctgggcagtgtgtttt

SEQ ID NO: 2721 - RNA, 140 nt, synthetic construct
  source 1..140: mol_type = other RNA; note = pegRNA
tgcactcacactgcccagaggttttagagctagaaatagcaagttaaaataaggctagtccgttatcaacttgaaaaagtggcaccgagtcggtgctcagtgaacaaattctgcaatccgcactctgggcagtgtgagtg

SEQ ID NO: 2722 - RNA, 140 nt, synthetic construct
  source 1..140: mol_type = other RNA; note = pegRNA
tgcactcacactgcccagaggttttagagctagaaatagcaagttaaaataaggctagtccgttatcaacttgaaaaagtggcaccgagtcggtgctcagtgaacaaattctgcaatccgcactctgggcagtgtgtttt

SEQ ID NO: 2723 - RNA, 140 nt, synthetic construct
  source 1..140: mol_type = other RNA; note = pegRNA
tgcactcacactgcccagaggttttagagctagaaatagcaagttaaaataaggctagtccgttatcaacttgaaaaagtggcaccgagtcggtgctgaacaaattctgcaatccacactctgggcagtgtgagtgtttt

SEQ ID NO: 2724 - RNA, 140 nt, synthetic construct
  source 1..140: mol_type = other RNA; note = pegRNA
tgcactcacactgcccagaggttttagagctagaaatagcaagttaaaataaggctagtccgttatcaacttgaaaaagtggcaccgagtcggtgctgaacaaattctgcaatccgcactctgggcagtgtgagtgtttt

SEQ ID NO: 2725 - RNA, 140 nt, synthetic construct
  source 1..140: mol_type = other RNA; note = pegRNA
tgcactcacactgcccagaggttttagagctagaaatagcaagttaaaataaggctagtccgttatcaacttgaaaaagtggcaccgagtcggtgctggctcagtgaacaaattctgcaatccacactctgggcagtgtg

SEQ ID NO: 2726 - RNA, 140 nt, synthetic construct
  source 1..140: mol_type = other RNA; note = pegRNA
tgcactcacactgcccagaggttttagagctagaaatagcaagttaaaataaggctagtccgttatcaacttgaaaaagtggcaccgagtcggtgctggctcagtgaacaaattctgcaatccgcactctgggcagtgtg

SEQ ID NO: 2727 - RNA, 141 nt, synthetic construct
  source 1..141: mol_type = other RNA; note = pegRNA
tgcactcacactgcccagaggttttagagctagaaatagcaagttaaaataaggctagtccgttatcaacttgaaaaagtggcaccgagtcggtgcagtgaacaaattctgcaatccacactctgggcagtgtgagttttt

SEQ ID NO: 2728 - RNA, 141 nt, synthetic construct
  source 1..141: mol_type = other RNA; note = pegRNA
tgcactcacactgcccagaggttttagagctagaaatagcaagttaaaataaggctagtccgttatcaacttgaaaaagtggcaccgagtcggtgcagtgaacaaattctgcaatccgcactctgggcagtgtgagttttt

SEQ ID NO: 2729 - RNA, 141 nt, synthetic construct
  source 1..141: mol_type = other RNA; note = pegRNA
tgcactcacactgcccagaggttttagagctagaaatagcaagttaaaataaggctagtccgttatcaacttgaaaaagtggcaccgagtcggtgcatggctcagtgaacaaattctgcaatccacactctgggcagtgtg

SEQ ID NO: 2730 - RNA, 141 nt, synthetic construct
  source 1..141: mol_type = other RNA; note = pegRNA
tgcactcacactgcccagaggttttagagctagaaatagcaagttaaaataaggctagtccgttatcaacttgaaaaagtggcaccgagtcggtgcatggctcagtgaacaaattctgcaatccgcactctgggcagtgtg

SEQ ID NO: 2731 - RNA, 141 nt, synthetic construct
  source 1..141: mol_type = other RNA; note = pegRNA
tgcactcacactgcccagaggttttagagctagaaatagcaagttaaaataaggctagtccgttatcaacttgaaaaagtggcaccgagtcggtgccagtgaacaaattctgcaatccacactctgggcagtgtgagtttt

SEQ ID NO: 2732 - RNA, 141 nt, synthetic construct
  source 1..141: mol_type = other RNA; note = pegRNA
tgcactcacactgcccagaggttttagagctagaaatagcaagttaaaataaggctagtccgttatcaacttgaaaaagtggcaccgagtcggtgccagtgaacaaattctgcaatccgcactctgggcagtgtgagtttt

SEQ ID NO: 2733 - RNA, 141 nt, synthetic construct
  source 1..141: mol_type = other RNA; note = pegRNA
tgcactcacactgcccagaggttttagagctagaaatagcaagttaaaataaggctagtccgttatcaacttgaaaaagtggcaccgagtcggtgccatggctcagtgaacaaattctgcaatccacactctgggcagtgt

SEQ ID NO: 2734 - RNA, 141 nt, synthetic construct
  source 1..141: mol_type = other RNA; note = pegRNA
tgcactcacactgcccagaggttttagagctagaaatagcaagttaaaataaggctagtccgttatcaacttgaaaaagtggcaccgagtcggtgccatggctcagtgaacaaattctgcaatccgcactctgggcagtgt

SEQ ID NO: 2735 - RNA, 141 nt, synthetic construct
  source 1..141: mol_type = other RNA; note = pegRNA
tgcactcacactgcccagaggttttagagctagaaatagcaagttaaaataaggctagtccgttatcaacttgaaaaagtggcaccgagtcggtgcccatggctcagtgaacaaattctgcaatccacactctgggcagtg

SEQ ID NO: 2736 - RNA, 141 nt, synthetic construct
  source 1..141: mol_type = other RNA; note = pegRNA
tgcactcacactgcccagaggttttagagctagaaatagcaagttaaaataaggctagtccgttatcaacttgaaaaagtggcaccgagtcggtgcccatggctcagtgaacaaattctgcaatccgcactctgggcagtg

SEQ ID NO: 2737 - RNA, 141 nt, synthetic construct
  source 1..141: mol_type = other RNA; note = pegRNA
tgcactcacactgcccagaggttttagagctagaaatagcaagttaaaataaggctagtccgttatcaacttgaaaaagtggcaccgagtcggtgcctcagtgaacaaattctgcaatccacactctgggcagtgtgagtg

SEQ ID NO: 2738 - RNA, 141 nt, synthetic construct
  source 1..141: mol_type = other RNA; note = pegRNA
tgcactcacactgcccagaggttttagagctagaaatagcaagttaaaataaggctagtccgttatcaacttgaaaaagtggcaccgagtcggtgcctcagtgaacaaattctgcaatccacactctgggcagtgtgtttt

SEQ ID NO: 2739 - RNA, 141 nt, synthetic construct
  source 1..141: mol_type = other RNA; note = pegRNA
tgcactcacactgcccagaggttttagagctagaaatagcaagttaaaataaggctagtccgttatcaacttgaaaaagtggcaccgagtcggtgcctcagtgaacaaattctgcaatccgcactctgggcagtgtgagtg

SEQ ID NO: 2740 - RNA, 141 nt, synthetic construct
  source 1..141: mol_type = other RNA; note = pegRNA
tgcactcacactgcccagaggttttagagctagaaatagcaagttaaaataaggctagtccgttatcaacttgaaaaagtggcaccgagtcggtgcctcagtgaacaaattctgcaatccgcactctgggcagtgtgtttt

SEQ ID NO: 2741 - RNA, 141 nt, synthetic construct
  source 1..141: mol_type = other RNA; note = pegRNA
tgcactcacactgcccagaggttttagagctagaaatagcaagttaaaataaggctagtccgttatcaacttgaaaaagtggcaccgagtcggtgcgctcagtgaacaaattctgcaatccacactctgggcagtgtgagt

SEQ ID NO: 2742 - RNA, 141 nt, synthetic construct
  source 1..141: mol_type = other RNA; note = pegRNA
tgcactcacactgcccagaggttttagagctagaaatagcaagttaaaataaggctagtccgttatcaacttgaaaaagtggcaccgagtcggtgcgctcagtgaacaaattctgcaatccacactctgggcagtgttttt

SEQ ID NO: 2743 - RNA, 141 nt, synthetic construct
  source 1..141: mol_type = other RNA; note = pegRNA
tgcactcacactgcccagaggttttagagctagaaatagcaagttaaaataaggctagtccgttatcaacttgaaaaagtggcaccgagtcggtgcgctcagtgaacaaattctgcaatccgcactctgggcagtgtgagt

SEQ ID NO: 2744 - RNA, 141 nt, synthetic construct
  source 1..141: mol_type = other RNA; note = pegRNA
tgcactcacactgcccagaggttttagagctagaaatagcaagttaaaataaggctagtccgttatcaacttgaaaaagtggcaccgagtcggtgcgctcagtgaacaaattctgcaatccgcactctgggcagtgttttt

SEQ ID NO: 2745 - RNA, 141 nt, synthetic construct
  source 1..141: mol_type = other RNA; note = pegRNA
tgcactcacactgcccagaggttttagagctagaaatagcaagttaaaataaggctagtccgttatcaacttgaaaaagtggcaccgagtcggtgcggctcagtgaacaaattctgcaatccacactctgggcagtgtgag

SEQ ID NO: 2746 - RNA, 141 nt, synthetic construct
  source 1..141: mol_type = other RNA; note = pegRNA
tgcactcacactgcccagaggttttagagctagaaatagcaagttaaaataaggctagtccgttatcaacttgaaaaagtggcaccgagtcggtgcggctcagtgaacaaattctgcaatccacactctgggcagtgtttt

SEQ ID NO: 2747 - RNA, 141 nt, synthetic construct
  source 1..141: mol_type = other RNA; note = pegRNA
tgcactcacactgcccagaggttttagagctagaaatagcaagttaaaataaggctagtccgttatcaacttgaaaaagtggcaccgagtcggtgcggctcagtgaacaaattctgcaatccgcactctgggcagtgtgag

SEQ ID NO: 2748 - RNA, 141 nt, synthetic construct
  source 1..141: mol_type = other RNA; note = pegRNA
tgcactcacactgcccagaggttttagagctagaaatagcaagttaaaataaggctagtccgttatcaacttgaaaaagtggcaccgagtcggtgcggctcagtgaacaaattctgcaatccgcactctgggcagtgtttt

SEQ ID NO: 2749 - RNA, 141 nt, synthetic construct
  source 1..141: mol_type = other RNA; note = pegRNA
tgcactcacactgcccagaggttttagagctagaaatagcaagttaaaataaggctagtccgttatcaacttgaaaaagtggcaccgagtcggtgcgtgaacaaattctgcaatccacactctgggcagtgtgagtgtttt

SEQ ID NO: 2750 - RNA, 141 nt, synthetic construct
  source 1..141: mol_type = other RNA; note = pegRNA
tgcactcacactgcccagaggttttagagctagaaatagcaagttaaaataaggctagtccgttatcaacttgaaaaagtggcaccgagtcggtgcgtgaacaaattctgcaatccgcactctgggcagtgtgagtgtttt

SEQ ID NO: 2751 - RNA, 141 nt, synthetic construct
  source 1..141: mol_type = other RNA; note = pegRNA
tgcactcacactgcccagaggttttagagctagaaatagcaagttaaaataaggctagtccgttatcaacttgaaaaagtggcaccgagtcggtgctcagtgaacaaattctgcaatccacactctgggcagtgtgagtgc

SEQ ID NO: 2752 - RNA, 141 nt, synthetic construct
  source 1..141: mol_type = other RNA; note = pegRNA
tgcactcacactgcccagaggttttagagctagaaatagcaagttaaaataaggctagtccgttatcaacttgaaaaagtggcaccgagtcggtgctcagtgaacaaattctgcaatccacactctgggcagtgtgatttt

SEQ ID NO: 2753 - RNA, 141 nt, synthetic construct
  source 1..141: mol_type = other RNA; note = pegRNA
tgcactcacactgcccagaggttttagagctagaaatagcaagttaaaataaggctagtccgttatcaacttgaaaaagtggcaccgagtcggtgctcagtgaacaaattctgcaatccgcactctgggcagtgtgagtgc

SEQ ID NO: 2754 - RNA, 141 nt, synthetic construct
  source 1..141: mol_type = other RNA; note = pegRNA
tgcactcacactgcccagaggttttagagctagaaatagcaagttaaaataaggctagtccgttatcaacttgaaaaagtggcaccgagtcggtgctcagtgaacaaattctgcaatccgcactctgggcagtgtgatttt

SEQ ID NO: 2755 - RNA, 141 nt, synthetic construct
  source 1..141: mol_type = other RNA; note = pegRNA
tgcactcacactgcccagaggttttagagctagaaatagcaagttaaaataaggctagtccgttatcaacttgaaaaagtggcaccgagtcggtgctccatggctcagtgaacaaattctgcaatccacactctgggcagt

SEQ ID NO: 2756 - RNA, 141 nt, synthetic construct
  source 1..141: mol_type = other RNA; note = pegRNA
tgcactcacactgcccagaggttttagagctagaaatagcaagttaaaataaggctagtccgttatcaacttgaaaaagtggcaccgagtcggtgctccatggctcagtgaacaaattctgcaatccgcactctgggcagt

SEQ ID NO: 2757 - RNA, 141 nt, synthetic construct
  source 1..141: mol_type = other RNA; note = pegRNA
tgcactcacactgcccagaggttttagagctagaaatagcaagttaaaataaggctagtccgttatcaacttgaaaaagtggcaccgagtcggtgctgaacaaattctgcaatccacactctgggcagtgtgagtgctttt

SEQ ID NO: 2758 - RNA, 141 nt, synthetic construct
  source 1..141: mol_type = other RNA; note = pegRNA
tgcactcacactgcccagaggttttagagctagaaatagcaagttaaaataaggctagtccgttatcaacttgaaaaagtggcaccgagtcggtgctgaacaaattctgcaatccgcactctgggcagtgtgagtgctttt

SEQ ID NO: 2759 - RNA, 141 nt, synthetic construct
  source 1..141: mol_type = other RNA; note = pegRNA
tgcactcacactgcccagaggttttagagctagaaatagcaagttaaaataaggctagtccgttatcaacttgaaaaagtggcaccgagtcggtgctggctcagtgaacaaattctgcaatccacactctgggcagtgtga

SEQ ID NO: 2760 - RNA, 141 nt, synthetic construct
  source 1..141: mol_type = other RNA; note = pegRNA
tgcactcacactgcccagaggttttagagctagaaatagcaagttaaaataaggctagtccgttatcaacttgaaaaagtggcaccgagtcggtgctggctcagtgaacaaattctgcaatccacactctgggcagttttt

SEQ ID NO: 2761 - RNA, 141 nt, synthetic construct
  source 1..141: mol_type = other RNA; note = pegRNA
tgcactcacactgcccagaggttttagagctagaaatagcaagttaaaataaggctagtccgttatcaacttgaaaaagtggcaccgagtcggtgctggctcagtgaacaaattctgcaatccgcactctgggcagtgtga

SEQ ID NO: 2762 - RNA, 141 nt, synthetic construct
  source 1..141: mol_type = other RNA; note = pegRNA
tgcactcacactgcccagaggttttagagctagaaatagcaagttaaaataaggctagtccgttatcaacttgaaaaagtggcaccgagtcggtgctggctcagtgaacaaattctgcaatccgcactctgggcagttttt

SEQ ID NO: 2763 - RNA, 142 nt, synthetic construct
  source 1..142: mol_type = other RNA; note = pegRNA
tgcactcacactgcccagaggttttagagctagaaatagcaagttaaaataaggctagtccgttatcaacttgaaaaagtggcaccgagtcggtgcagtgaacaaattctgcaatccacactctgggcagtgtgagtgtttt

SEQ ID NO: 2764 - RNA, 142 nt, synthetic construct
  source 1..142: mol_type = other RNA; note = pegRNA
tgcactcacactgcccagaggttttagagctagaaatagcaagttaaaataaggctagtccgttatcaacttgaaaaagtggcaccgagtcggtgcagtgaacaaattctgcaatccgcactctgggcagtgtgagtgtttt

SEQ ID NO: 2765 - RNA, 142 nt, synthetic construct
  source 1..142: mol_type = other RNA; note = pegRNA
tgcactcacactgcccagaggttttagagctagaaatagcaagttaaaataaggctagtccgttatcaacttgaaaaagtggcaccgagtcggtgcatggctcagtgaacaaattctgcaatccacactctgggcagtgtga

SEQ ID NO: 2766 - RNA, 142 nt, synthetic construct
  source 1..142: mol_type = other RNA; note = pegRNA
tgcactcacactgcccagaggttttagagctagaaatagcaagttaaaataaggctagtccgttatcaacttgaaaaagtggcaccgagtcggtgcatggctcagtgaacaaattctgcaatccacactctgggcagttttt

SEQ ID NO: 2767 - RNA, 142 nt, synthetic construct
  source 1..142: mol_type = other RNA; note = pegRNA
tgcactcacactgcccagaggttttagagctagaaatagcaagttaaaataaggctagtccgttatcaacttgaaaaagtggcaccgagtcggtgcatggctcagtgaacaaattctgcaatccgcactctgggcagtgtga

SEQ ID NO: 2768 - RNA, 142 nt, synthetic construct
  source 1..142: mol_type = other RNA; note = pegRNA
tgcactcacactgcccagaggttttagagctagaaatagcaagttaaaataaggctagtccgttatcaacttgaaaaagtggcaccgagtcggtgcatggctcagtgaacaaattctgcaatccgcactctgggcagttttt

SEQ ID NO: 2769 - RNA, 142 nt, synthetic construct
  source 1..142: mol_type = other RNA; note = pegRNA
tgcactcacactgcccagaggttttagagctagaaatagcaagttaaaataaggctagtccgttatcaacttgaaaaagtggcaccgagtcggtgccagtgaacaaattctgcaatccacactctgggcagtgtgagttttt

SEQ ID NO: 2770 - RNA, 142 nt, synthetic construct
  source 1..142: mol_type = other RNA; note = pegRNA
tgcactcacactgcccagaggttttagagctagaaatagcaagttaaaataaggctagtccgttatcaacttgaaaaagtggcaccgagtcggtgccagtgaacaaattctgcaatccgcactctgggcagtgtgagttttt

SEQ ID NO: 2771 - RNA, 142 nt, synthetic construct
  source 1..142: mol_type = other RNA; note = pegRNA
tgcactcacactgcccagaggttttagagctagaaatagcaagttaaaataaggctagtccgttatcaacttgaaaaagtggcaccgagtcggtgccatggctcagtgaacaaattctgcaatccacactctgggcagtgtg

SEQ ID NO: 2772 - RNA, 142 nt, synthetic construct
  source 1..142: mol_type = other RNA; note = pegRNA
tgcactcacactgcccagaggttttagagctagaaatagcaagttaaaataaggctagtccgttatcaacttgaaaaagtggcaccgagtcggtgccatggctcagtgaacaaattctgcaatccgcactctgggcagtgtg

SEQ ID NO: 2773 - RNA, 142 nt, synthetic construct
  source 1..142: mol_type = other RNA; note = pegRNA
tgcactcacactgcccagaggttttagagctagaaatagcaagttaaaataaggctagtccgttatcaacttgaaaaagtggcaccgagtcggtgcccatggctcagtgaacaaattctgcaatccacactctgggcagtgt

SEQ ID NO: 2774 - RNA, 142 nt, synthetic construct
  source 1..142: mol_type = other RNA; note = pegRNA
tgcactcacactgcccagaggttttagagctagaaatagcaagttaaaataaggctagtccgttatcaacttgaaaaagtggcaccgagtcggtgcccatggctcagtgaacaaattctgcaatccgcactctgggcagtgt

SEQ ID NO: 2775 - RNA, 142 nt, synthetic construct
  source 1..142: mol_type = other RNA; note = pegRNA
tgcactcacactgcccagaggttttagagctagaaatagcaagttaaaataaggctagtccgttatcaacttgaaaaagtggcaccgagtcggtgcctcagtgaacaaattctgcaatccacactctgggcagtgtgagtgc

SEQ ID NO: 2776 - RNA, 142 nt, synthetic construct
  source 1..142: mol_type = other RNA; note = pegRNA
tgcactcacactgcccagaggttttagagctagaaatagcaagttaaaataaggctagtccgttatcaacttgaaaaagtggcaccgagtcggtgcctcagtgaacaaattctgcaatccacactctgggcagtgtgatttt

SEQ ID NO: 2777 - RNA, 142 nt, synthetic construct
  source 1..142: mol_type = other RNA; note = pegRNA
tgcactcacactgcccagaggttttagagctagaaatagcaagttaaaataaggctagtccgttatcaacttgaaaaagtggcaccgagtcggtgcctcagtgaacaaattctgcaatccgcactctgggcagtgtgagtgc

SEQ ID NO: 2778 - RNA, 142 nt, synthetic construct
  source 1..142: mol_type = other RNA; note = pegRNA
tgcactcacactgcccagaggttttagagctagaaatagcaagttaaaataaggctagtccgttatcaacttgaaaaagtggcaccgagtcggtgcctcagtgaacaaattctgcaatccgcactctgggcagtgtgatttt

SEQ ID NO: 2779 - RNA, 142 nt, synthetic construct
  source 1..142: mol_type = other RNA; note = pegRNA
tgcactcacactgcccagaggttttagagctagaaatagcaagttaaaataaggctagtccgttatcaacttgaaaaagtggcaccgagtcggtgcctccatggctcagtgaacaaattctgcaatccacactctgggcagt

SEQ ID NO: 2780 - RNA, 142 nt, synthetic construct
  source 1..142: mol_type = other RNA; note = pegRNA
tgcactcacactgcccagaggttttagagctagaaatagcaagttaaaataaggctagtccgttatcaacttgaaaaagtggcaccgagtcggtgcctccatggctcagtgaacaaattctgcaatccgcactctgggcagt

SEQ ID NO: 2781 - RNA, 142 nt, synthetic construct
  source 1..142: mol_type = other RNA; note = pegRNA
tgcactcacactgcccagaggttttagagctagaaatagcaagttaaaataaggctagtccgttatcaacttgaaaaagtggcaccgagtcggtgcgctcagtgaacaaattctgcaatccacactctgggcagtgtgagtg

SEQ ID NO: 2782 - RNA, 142 nt, synthetic construct
  source 1..142: mol_type = other RNA; note = pegRNA
tgcactcacactgcccagaggttttagagctagaaatagcaagttaaaataaggctagtccgttatcaacttgaaaaagtggcaccgagtcggtgcgctcagtgaacaaattctgcaatccacactctgggcagtgtgtttt

SEQ ID NO: 2783 - RNA, 142 nt, synthetic construct
  source 1..142: mol_type = other RNA; note = pegRNA
tgcactcacactgcccagaggttttagagctagaaatagcaagttaaaataaggctagtccgttatcaacttgaaaaagtggcaccgagtcggtgcgctcagtgaacaaattctgcaatccgcactctgggcagtgtgagtg

SEQ ID NO: 2784 - RNA, 142 nt, synthetic construct
  source 1..142: mol_type = other RNA; note = pegRNA
tgcactcacactgcccagaggttttagagctagaaatagcaagttaaaataaggctagtccgttatcaacttgaaaaagtggcaccgagtcggtgcgctcagtgaacaaattctgcaatccgcactctgggcagtgtgtttt

SEQ ID NO: 2785 - RNA, 142 nt, synthetic construct
  source 1..142: mol_type = other RNA; note = pegRNA
tgcactcacactgcccagaggttttagagctagaaatagcaagttaaaataaggctagtccgttatcaacttgaaaaagtggcaccgagtcggtgcggctcagtgaacaaattctgcaatccacactctgggcagtgtgagt

SEQ ID NO: 2786 - RNA, 142 nt, synthetic construct
  source 1..142: mol_type = other RNA; note = pegRNA
tgcactcacactgcccagaggttttagagctagaaatagcaagttaaaataaggctagtccgttatcaacttgaaaaagtggcaccgagtcggtgcggctcagtgaacaaattctgcaatccacactctgggcagtgttttt

SEQ ID NO: 2787 - RNA, 142 nt, synthetic construct
  source 1..142: mol_type = other RNA; note = pegRNA
tgcactcacactgcccagaggttttagagctagaaatagcaagttaaaataaggctagtccgttatcaacttgaaaaagtggcaccgagtcggtgcggctcagtgaacaaattctgcaatccgcactctgggcagtgtgagt

SEQ ID NO: 2788 - RNA, 142 nt, synthetic construct
  source 1..142: mol_type = other RNA; note = pegRNA
tgcactcacactgcccagaggttttagagctagaaatagcaagttaaaataaggctagtccgttatcaacttgaaaaagtggcaccgagtcggtgcggctcagtgaacaaattctgcaatccgcactctgggcagtgttttt

SEQ ID NO: 2789 - RNA, 142 nt, synthetic construct
  source 1..142: mol_type = other RNA; note = pegRNA
tgcactcacactgcccagaggttttagagctagaaatagcaagttaaaataaggctagtccgttatcaacttgaaaaagtggcaccgagtcggtgcgtgaacaaattctgcaatccacactctgggcagtgtgagtgctttt

SEQ ID NO: 2790 - RNA, 142 nt, synthetic construct
  source 1..142: mol_type = other RNA; note = pegRNA
tgcactcacactgcccagaggttttagagctagaaatagcaagttaaaataaggctagtccgttatcaacttgaaaaagtggcaccgagtcggtgcgtgaacaaattctgcaatccgcactctgggcagtgtgagtgctttt

SEQ ID NO: 2791 - RNA, 142 nt, synthetic construct
  source 1..142: mol_type = other RNA; note = pegRNA
tgcactcacactgcccagaggttttagagctagaaatagcaagttaaaataaggctagtccgttatcaacttgaaaaagtggcaccgagtcggtgctcagtgaacaaattctgcaatccacactctgggcagtgtgagtttt

SEQ ID NO: 2792 - RNA, 142 nt, synthetic construct
  source 1..142: mol_type = other RNA; note = pegRNA
tgcactcacactgcccagaggttttagagctagaaatagcaagttaaaataaggctagtccgttatcaacttgaaaaagtggcaccgagtcggtgctcagtgaacaaattctgcaatccgcactctgggcagtgtgagtttt

SEQ ID NO: 2793 - RNA, 142 nt, synthetic construct
  source 1..142: mol_type = other RNA; note = pegRNA
tgcactcacactgcccagaggttttagagctagaaatagcaagttaaaataaggctagtccgttatcaacttgaaaaagtggcaccgagtcggtgctccatggctcagtgaacaaattctgcaatccacactctgggcagtg

SEQ ID NO: 2794 - RNA, 142 nt, synthetic construct
  source 1..142: mol_type = other RNA; note = pegRNA
tgcactcacactgcccagaggttttagagctagaaatagcaagttaaaataaggctagtccgttatcaacttgaaaaagtggcaccgagtcggtgctccatggctcagtgaacaaattctgcaatccgcactctgggcagtg

SEQ ID NO: 2795 - RNA, 142 nt, synthetic construct
  source 1..142: mol_type = other RNA; note = pegRNA
tgcactcacactgcccagaggttttagagctagaaatagcaagttaaaataaggctagtccgttatcaacttgaaaaagtggcaccgagtcggtgctggctcagtgaacaaattctgcaatccacactctgggcagtgtgag

SEQ ID NO: 2796 - RNA, 142 nt, synthetic construct
  source 1..142: mol_type = other RNA; note = pegRNA
tgcactcacactgcccagaggttttagagctagaaatagcaagttaaaataaggctagtccgttatcaacttgaaaaagtggcaccgagtcggtgctggctcagtgaacaaattctgcaatccacactctgggcagtgtttt

SEQ ID NO: 2797 - RNA, 142 nt, synthetic construct
  source 1..142: mol_type = other RNA; note = pegRNA
tgcactcacactgcccagaggttttagagctagaaatagcaagttaaaataaggctagtccgttatcaacttgaaaaagtggcaccgagtcggtgctggctcagtgaacaaattctgcaatccgcactctgggcagtgtgag

SEQ ID NO: 2798 - RNA, 142 nt, synthetic construct
  source 1..142: mol_type = other RNA; note = pegRNA
tgcactcacactgcccagaggttttagagctagaaatagcaagttaaaataaggctagtccgttatcaacttgaaaaagtggcaccgagtcggtgctggctcagtgaacaaattctgcaatccgcactctgggcagtgtttt

SEQ ID NO: 2799 - RNA, 143 nt, synthetic construct
  source 1..143: mol_type = other RNA; note = pegRNA
tgcactcacactgcccagaggttttagagctagaaatagcaagttaaaataaggctagtccgttatcaacttgaaaaagtggcaccgagtcggtgcagtgaacaaattctgcaatccacactctgggcagtgtgagtgctttt

SEQ ID NO: 2800 - RNA, 143 nt, synthetic construct
  source 1..143: mol_type = other RNA; note = pegRNA
tgcactcacactgcccagaggttttagagctagaaatagcaagttaaaataaggctagtccgttatcaacttgaaaaagtggcaccgagtcggtgcagtgaacaaattctgcaatccgcactctgggcagtgtgagtgctttt

SEQ ID NO: 2801 - RNA, 143 nt, synthetic construct
  source 1..143: mol_type = other RNA; note = pegRNA
tgcactcacactgcccagaggttttagagctagaaatagcaagttaaaataaggctagtccgttatcaacttgaaaaagtggcaccgagtcggtgcatggctcagtgaacaaattctgcaatccacactctgggcagtgtgag

SEQ ID NO: 2802 - RNA, 143 nt, synthetic construct
  source 1..143: mol_type = other RNA; note = pegRNA
tgcactcacactgcccagaggttttagagctagaaatagcaagttaaaataaggctagtccgttatcaacttgaaaaagtggcaccgagtcggtgcatggctcagtgaacaaattctgcaatccacactctgggcagtgtttt

SEQ ID NO: 2803 - RNA, 143 nt, synthetic construct
  source 1..143: mol_type = other RNA; note = pegRNA
tgcactcacactgcccagaggttttagagctagaaatagcaagttaaaataaggctagtccgttatcaacttgaaaaagtggcaccgagtcggtgcatggctcagtgaacaaattctgcaatccgcactctgggcagtgtgag

SEQ ID NO: 2804 - RNA, 143 nt, synthetic construct
  source 1..143: mol_type = other RNA; note = pegRNA
tgcactcacactgcccagaggttttagagctagaaatagcaagttaaaataaggctagtccgttatcaacttgaaaaagtggcaccgagtcggtgcatggctcagtgaacaaattctgcaatccgcactctgggcagtgtttt

SEQ ID NO: 2805 - RNA, 143 nt, synthetic construct
  source 1..143: mol_type = other RNA; note = pegRNA
tgcactcacactgcccagaggttttagagctagaaatagcaagttaaaataaggctagtccgttatcaacttgaaaaagtggcaccgagtcggtgccagtgaacaaattctgcaatccacactctgggcagtgtgagtgtttt

SEQ ID NO: 2806 - RNA, 143 nt, synthetic construct
  source 1..143: mol_type = other RNA; note = pegRNA
tgcactcacactgcccagaggttttagagctagaaatagcaagttaaaataaggctagtccgttatcaacttgaaaaagtggcaccgagtcggtgccagtgaacaaattctgcaatccgcactctgggcagtgtgagtgtttt

SEQ ID NO: 2807 - RNA, 143 nt, synthetic construct
  source 1..143: mol_type = other RNA; note = pegRNA
tgcactcacactgcccagaggttttagagctagaaatagcaagttaaaataaggctagtccgttatcaacttgaaaaagtggcaccgagtcggtgccatggctcagtgaacaaattctgcaatccacactctgggcagtgtga

SEQ ID NO: 2808 - RNA, 143 nt, synthetic construct
  source 1..143: mol_type = other RNA; note = pegRNA
tgcactcacactgcccagaggttttagagctagaaatagcaagttaaaataaggctagtccgttatcaacttgaaaaagtggcaccgagtcggtgccatggctcagtgaacaaattctgcaatccacactctgggcagttttt

SEQ ID NO: 2809 - RNA, 143 nt, synthetic construct
  source 1..143: mol_type = other RNA; note = pegRNA
tgcactcacactgcccagaggttttagagctagaaatagcaagttaaaataaggctagtccgttatcaacttgaaaaagtggcaccgagtcggtgccatggctcagtgaacaaattctgcaatccgcactctgggcagtgtga

SEQ ID NO: 2810 - RNA, 143 nt, synthetic construct
  source 1..143: mol_type = other RNA; note = pegRNA
tgcactcacactgcccagaggttttagagctagaaatagcaagttaaaataaggctagtccgttatcaacttgaaaaagtggcaccgagtcggtgccatggctcagtgaacaaattctgcaatccgcactctgggcagttttt

SEQ ID NO: 2811 - RNA, 143 nt, synthetic construct
  source 1..143: mol_type = other RNA; note = pegRNA
tgcactcacactgcccagaggttttagagctagaaatagcaagttaaaataaggctagtccgttatcaacttgaaaaagtggcaccgagtcggtgcccatggctcagtgaacaaattctgcaatccacactctgggcagtgtg

SEQ ID NO: 2812 - RNA, 143 nt, synthetic construct
  source 1..143: mol_type = other RNA; note = pegRNA
tgcactcacactgcccagaggttttagagctagaaatagcaagttaaaataaggctagtccgttatcaacttgaaaaagtggcaccgagtcggtgcccatggctcagtgaacaaattctgcaatccgcactctgggcagtgtg

SEQ ID NO: 2813 - RNA, 143 nt, synthetic construct
  source 1..143: mol_type = other RNA; note = pegRNA
tgcactcacactgcccagaggttttagagctagaaatagcaagttaaaataaggctagtccgttatcaacttgaaaaagtggcaccgagtcggtgccctccatggctcagtgaacaaattctgcaatccacactctgggcagt

SEQ ID NO: 2814 - RNA, 143 nt, synthetic construct
  source 1..143: mol_type = other RNA; note = pegRNA
tgcactcacactgcccagaggttttagagctagaaatagcaagttaaaataaggctagtccgttatcaacttgaaaaagtggcaccgagtcggtgccctccatggctcagtgaacaaattctgcaatccgcactctgggcagt

SEQ ID NO: 2815 - RNA, 143 nt, synthetic construct
  source 1..143: mol_type = other RNA; note = pegRNA
tgcactcacactgcccagaggttttagagctagaaatagcaagttaaaataaggctagtccgttatcaacttgaaaaagtggcaccgagtcggtgcctcagtgaacaaattctgcaatccacactctgggcagtgtgagtttt

SEQ ID NO: 2816 - RNA, 143 nt, synthetic construct
  source 1..143: mol_type = other RNA; note = pegRNA
tgcactcacactgcccagaggttttagagctagaaatagcaagttaaaataaggctagtccgttatcaacttgaaaaagtggcaccgagtcggtgcctcagtgaacaaattctgcaatccgcactctgggcagtgtgagtttt

SEQ ID NO: 2817 - RNA, 143 nt, synthetic construct
  source 1..143: mol_type = other RNA; note = pegRNA
tgcactcacactgcccagaggttttagagctagaaatagcaagttaaaataaggctagtccgttatcaacttgaaaaagtggcaccgagtcggtgcctccatggctcagtgaacaaattctgcaatccacactctgggcagtg

SEQ ID NO: 2818 - RNA, 143 nt, synthetic construct
  source 1..143: mol_type = other RNA; note = pegRNA
tgcactcacactgcccagaggttttagagctagaaatagcaagttaaaataaggctagtccgttatcaacttgaaaaagtggcaccgagtcggtgcctccatggctcagtgaacaaattctgcaatccgcactctgggcagtg

SEQ ID NO: 2819 - RNA, 143 nt, synthetic construct
  source 1..143: mol_type = other RNA; note = pegRNA
tgcactcacactgcccagaggttttagagctagaaatagcaagttaaaataaggctagtccgttatcaacttgaaaaagtggcaccgagtcggtgcgctcagtgaacaaattctgcaatccacactctgggcagtgtgagtgc

SEQ ID NO: 2820 - RNA, 143 nt, synthetic construct
  source 1..143: mol_type = other RNA; note = pegRNA
tgcactcacactgcccagaggttttagagctagaaatagcaagttaaaataaggctagtccgttatcaacttgaaaaagtggcaccgagtcggtgcgctcagtgaacaaattctgcaatccacactctgggcagtgtgatttt

SEQ ID NO: 2821 - RNA, 143 nt, synthetic construct
  source 1..143: mol_type = other RNA; note = pegRNA
tgcactcacactgcccagaggttttagagctagaaatagcaagttaaaataaggctagtccgttatcaacttgaaaaagtggcaccgagtcggtgcgctcagtgaacaaattctgcaatccgcactctgggcagtgtgagtgc

SEQ ID NO: 2822 - RNA, 143 nt, synthetic construct
  source 1..143: mol_type = other RNA; note = pegRNA
tgcactcacactgcccagaggttttagagctagaaatagcaagttaaaataaggctagtccgttatcaacttgaaaaagtggcaccgagtcggtgcgctcagtgaacaaattctgcaatccgcactctgggcagtgtgatttt

SEQ ID NO: 2823 - RNA, 143 nt, synthetic construct
  source 1..143: mol_type = other RNA; note = pegRNA
tgcactcacactgcccagaggttttagagctagaaatagcaagttaaaataaggctagtccgttatcaacttgaaaaagtggcaccgagtcggtgcggctcagtgaacaaattctgcaatccacactctgggcagtgtgagtg

SEQ ID NO: 2824 - RNA, 143 nt, synthetic construct
  source 1..143: mol_type = other RNA; note = pegRNA
tgcactcacactgcccagaggttttagagctagaaatagcaagttaaaataaggctagtccgttatcaacttgaaaaagtggcaccgagtcggtgcggctcagtgaacaaattctgcaatccacactctgggcagtgtgtttt

SEQ ID NO: 2825 - RNA, 143 nt, synthetic construct
  source 1..143: mol_type = other RNA; note = pegRNA
tgcactcacactgcccagaggttttagagctagaaatagcaagttaaaataaggctagtccgttatcaacttgaaaaagtggcaccgagtcggtgcggctcagtgaacaaattctgcaatccgcactctgggcagtgtgagtg

SEQ ID NO: 2826 - RNA, 143 nt, synthetic construct
  source 1..143: mol_type = other RNA; note = pegRNA
tgcactcacactgcccagaggttttagagctagaaatagcaagttaaaataaggctagtccgttatcaacttgaaaaagtggcaccgagtcggtgcggctcagtgaacaaattctgcaatccgcactctgggcagtgtgtttt

SEQ ID NO: 2827 - RNA, 143 nt, synthetic construct
  source 1..143: mol_type = other RNA; note = pegRNA
tgcactcacactgcccagaggttttagagctagaaatagcaagttaaaataaggctagtccgttatcaacttgaaaaagtggcaccgagtcggtgctcagtgaacaaattctgcaatccacactctgggcagtgtgagttttt

SEQ ID NO: 2828 - RNA, 143 nt, synthetic construct
  source 1..143: mol_type = other RNA; note = pegRNA
tgcactcacactgcccagaggttttagagctagaaatagcaagttaaaataaggctagtccgttatcaacttgaaaaagtggcaccgagtcggtgctcagtgaacaaattctgcaatccgcactctgggcagtgtgagttttt

SEQ ID NO: 2829 - RNA, 143 nt, synthetic construct
  source 1..143: mol_type = other RNA; note = pegRNA
tgcactcacactgcccagaggttttagagctagaaatagcaagttaaaataaggctagtccgttatcaacttgaaaaagtggcaccgagtcggtgctccatggctcagtgaacaaattctgcaatccacactctgggcagtgt

SEQ ID NO: 2830 - RNA, 143 nt, synthetic construct
  source 1..143: mol_type = other RNA; note = pegRNA
tgcactcacactgcccagaggttttagagctagaaatagcaagttaaaataaggctagtccgttatcaacttgaaaaagtggcaccgagtcggtgctccatggctcagtgaacaaattctgcaatccgcactctgggcagtgt

SEQ ID NO: 2831 - RNA, 143 nt, synthetic construct
  source 1..143: mol_type = other RNA; note = pegRNA
tgcactcacactgcccagaggttttagagctagaaatagcaagttaaaataaggctagtccgttatcaacttgaaaaagtggcaccgagtcggtgctggctcagtgaacaaattctgcaatccacactctgggcagtgtgagt

SEQ ID NO: 2832 - RNA, 143 nt, synthetic construct
  source 1..143: mol_type = other RNA; note = pegRNA
tgcactcacactgcccagaggttttagagctagaaatagcaagttaaaataaggctagtccgttatcaacttgaaaaagtggcaccgagtcggtgctggctcagtgaacaaattctgcaatccacactctgggcagtgttttt

SEQ ID NO: 2833 - RNA, 143 nt, synthetic construct
  source 1..143: mol_type = other RNA; note = pegRNA
tgcactcacactgcccagaggttttagagctagaaatagcaagttaaaataaggctagtccgttatcaacttgaaaaagtggcaccgagtcggtgctggctcagtgaacaaattctgcaatccgcactctgggcagtgtgagt

SEQ ID NO: 2834 - RNA, 143 nt, synthetic construct
  source 1..143: mol_type = other RNA; note = pegRNA
tgcactcacactgcccagaggttttagagctagaaatagcaagttaaaataaggctagtccgttatcaacttgaaaaagtggcaccgagtcggtgctggctcagtgaacaaattctgcaatccgcactctgggcagtgttttt

SEQ ID NO: 2835 - RNA, 144 nt, synthetic construct
  source 1..144: mol_type = other RNA; note = pegRNA
tgcactcacactgcccagaggttttagagctagaaatagcaagttaaaataaggctagtccgttatcaacttgaaaaagtggcaccgagtcggtgcacctccatggctcagtgaacaaattctgcaatccacactctgggcagt

SEQ ID NO: 2836 - RNA, 144 nt, synthetic construct
  source 1..144: mol_type = other RNA; note = pegRNA
tgcactcacactgcccagaggttttagagctagaaatagcaagttaaaataaggctagtccgttatcaacttgaaaaagtggcaccgagtcggtgcacctccatggctcagtgaacaaattctgcaatccgcactctgggcagt

SEQ ID NO: 2837 - RNA, 144 nt, synthetic construct
  source 1..144: mol_type = other RNA; note = pegRNA
tgcactcacactgcccagaggttttagagctagaaatagcaagttaaaataaggctagtccgttatcaacttgaaaaagtggcaccgagtcggtgcatggctcagtgaacaaattctgcaatccacactctgggcagtgtgagt

SEQ ID NO: 2838 - RNA, 144 nt, synthetic construct
  source 1..144: mol_type = other RNA; note = pegRNA
tgcactcacactgcccagaggttttagagctagaaatagcaagttaaaataaggctagtccgttatcaacttgaaaaagtggcaccgagtcggtgcatggctcagtgaacaaattctgcaatccacactctgggcagtgttttt

SEQ ID NO: 2839 - RNA, 144 nt, synthetic construct
  source 1..144: mol_type = other RNA; note = pegRNA
tgcactcacactgcccagaggttttagagctagaaatagcaagttaaaataaggctagtccgttatcaacttgaaaaagtggcaccgagtcggtgcatggctcagtgaacaaattctgcaatccgcactctgggcagtgtgagt

SEQ ID NO: 2840 - RNA, 144 nt, synthetic construct
  source 1..144: mol_type = other RNA; note = pegRNA
tgcactcacactgcccagaggttttagagctagaaatagcaagttaaaataaggctagtccgttatcaacttgaaaaagtggcaccgagtcggtgcatggctcagtgaacaaattctgcaatccgcactctgggcagtgttttt

SEQ ID NO: 2841 - RNA, 144 nt, synthetic construct
  source 1..144: mol_type = other RNA; note = pegRNA
tgcactcacactgcccagaggttttagagctagaaatagcaagttaaaataaggctagtccgttatcaacttgaaaaagtggcaccgagtcggtgccagtgaacaaattctgcaatccacactctgggcagtgtgagtgctttt

SEQ ID NO: 2842 - RNA, 144 nt, synthetic construct
  source 1..144: mol_type = other RNA; note = pegRNA
tgcactcacactgcccagaggttttagagctagaaatagcaagttaaaataaggctagtccgttatcaacttgaaaaagtggcaccgagtcggtgccagtgaacaaattctgcaatccgcactctgggcagtgtgagtgctttt

SEQ ID NO: 2843 - RNA, 144 nt, synthetic construct
  source 1..144: mol_type = other RNA; note = pegRNA
tgcactcacactgcccagaggttttagagctagaaatagcaagttaaaataaggctagtccgttatcaacttgaaaaagtggcaccgagtcggtgccatggctcagtgaacaaattctgcaatccacactctgggcagtgtgag

SEQ ID NO: 2844 - RNA, 144 nt, synthetic construct
  source 1..144: mol_type = other RNA; note = pegRNA
tgcactcacactgcccagaggttttagagctagaaatagcaagttaaaataaggctagtccgttatcaacttgaaaaagtggcaccgagtcggtgccatggctcagtgaacaaattctgcaatccacactctgggcagtgtttt

SEQ ID NO: 2845 - RNA, 144 nt, synthetic construct
  source 1..144: mol_type = other RNA; note = pegRNA
tgcactcacactgcccagaggttttagagctagaaatagcaagttaaaataaggctagtccgttatcaacttgaaaaagtggcaccgagtcggtgccatggctcagtgaacaaattctgcaatccgcactctgggcagtgtgag

SEQ ID NO: 2846 - RNA, 144 nt, synthetic construct
  source 1..144: mol_type = other RNA; note = pegRNA
tgcactcacactgcccagaggttttagagctagaaatagcaagttaaaataaggctagtccgttatcaacttgaaaaagtggcaccgagtcggtgccatggctcagtgaacaaattctgcaatccgcactctgggcagtgtttt

SEQ ID NO: 2847 - RNA, 144 nt, synthetic construct
  source 1..144: mol_type = other RNA; note = pegRNA
tgcactcacactgcccagaggttttagagctagaaatagcaagttaaaataaggctagtccgttatcaacttgaaaaagtggcaccgagtcggtgcccatggctcagtgaacaaattctgcaatccacactctgggcagtgtga

SEQ ID NO: 2848 - RNA, 144 nt, synthetic construct
  source 1..144: mol_type = other RNA; note = pegRNA
tgcactcacactgcccagaggttttagagctagaaatagcaagttaaaataaggctagtccgttatcaacttgaaaaagtggcaccgagtcggtgcccatggctcagtgaacaaattctgcaatccacactctgggcagttttt

SEQ ID NO: 2849 - RNA, 144 nt, synthetic construct
  source 1..144: mol_type = other RNA; note = pegRNA
tgcactcacactgcccagaggttttagagctagaaatagcaagttaaaataaggctagtccgttatcaacttgaaaaagtggcaccgagtcggtgcccatggctcagtgaacaaattctgcaatccgcactctgggcagtgtga

SEQ ID NO: 2850 - RNA, 144 nt, synthetic construct
  source 1..144: mol_type = other RNA; note = pegRNA
tgcactcacactgcccagaggttttagagctagaaatagcaagttaaaataaggctagtccgttatcaacttgaaaaagtggcaccgagtcggtgcccatggctcagtgaacaaattctgcaatccgcactctgggcagttttt

SEQ ID NO: 2851 - RNA, 144 nt, synthetic construct
  source 1..144: mol_type = other RNA; note = pegRNA
tgcactcacactgcccagaggttttagagctagaaatagcaagttaaaataaggctagtccgttatcaacttgaaaaagtggcaccgagtcggtgccctccatggctcagtgaacaaattctgcaatccacactctgggcagtg

SEQ ID NO: 2852 - RNA, 144 nt, synthetic construct
  source 1..144: mol_type = other RNA; note = pegRNA
tgcactcacactgcccagaggttttagagctagaaatagcaagttaaaataaggctagtccgttatcaacttgaaaaagtggcaccgagtcggtgccctccatggctcagtgaacaaattctgcaatccgcactctgggcagtg

SEQ ID NO: 2853 - RNA, 144 nt, synthetic construct
  source 1..144: mol_type = other RNA; note = pegRNA
tgcactcacactgcccagaggttttagagctagaaatagcaagttaaaataaggctagtccgttatcaacttgaaaaagtggcaccgagtcggtgcctcagtgaacaaattctgcaatccacactctgggcagtgtgagttttt

SEQ ID NO: 2854 - RNA, 144 nt, synthetic construct
  source 1..144: mol_type = other RNA; note = pegRNA
tgcactcacactgcccagaggttttagagctagaaatagcaagttaaaataaggctagtccgttatcaacttgaaaaagtggcaccgagtcggtgcctcagtgaacaaattctgcaatccgcactctgggcagtgtgagttttt

SEQ ID NO: 2855 - RNA, 144 nt, synthetic construct
  source 1..144: mol_type = other RNA; note = pegRNA
tgcactcacactgcccagaggttttagagctagaaatagcaagttaaaataaggctagtccgttatcaacttgaaaaagtggcaccgagtcggtgcctccatggctcagtgaacaaattctgcaatccacactctgggcagtgt

SEQ ID NO: 2856 - RNA, 144 nt, synthetic construct
  source 1..144: mol_type = other RNA; note = pegRNA
tgcactcacactgcccagaggttttagagctagaaatagcaagttaaaataaggctagtccgttatcaacttgaaaaagtggcaccgagtcggtgcctccatggctcagtgaacaaattctgcaatccgcactctgggcagtgt

SEQ ID NO: 2857 - RNA, 144 nt, synthetic construct
  source 1..144: mol_type = other RNA; note = pegRNA
tgcactcacactgcccagaggttttagagctagaaatagcaagttaaaataaggctagtccgttatcaacttgaaaaagtggcaccgagtcggtgcgctcagtgaacaaattctgcaatccacactctgggcagtgtgagtttt

SEQ ID NO: 2858 - RNA, 144 nt, synthetic construct
  source 1..144: mol_type = other RNA; note = pegRNA
tgcactcacactgcccagaggttttagagctagaaatagcaagttaaaataaggctagtccgttatcaacttgaaaaagtggcaccgagtcggtgcgctcagtgaacaaattctgcaatccgcactctgggcagtgtgagtttt

SEQ ID NO: 2859 - RNA, 144 nt, synthetic construct
  source 1..144: mol_type = other RNA; note = pegRNA
tgcactcacactgcccagaggttttagagctagaaatagcaagttaaaataaggctagtccgttatcaacttgaaaaagtggcaccgagtcggtgcggctcagtgaacaaattctgcaatccacactctgggcagtgtgagtgc

SEQ ID NO: 2860 - RNA, 144 nt, synthetic construct
  source 1..144: mol_type = other RNA; note = pegRNA
tgcactcacactgcccagaggttttagagctagaaatagcaagttaaaataaggctagtccgttatcaacttgaaaaagtggcaccgagtcggtgcggctcagtgaacaaattctgcaatccacactctgggcagtgtgatttt

SEQ ID NO: 2861 - RNA, 144 nt, synthetic construct
  source 1..144: mol_type = other RNA; note = pegRNA
tgcactcacactgcccagaggttttagagctagaaatagcaagttaaaataaggctagtccgttatcaacttgaaaaagtggcaccgagtcggtgcggctcagtgaacaaattctgcaatccgcactctgggcagtgtgagtgc

SEQ ID NO: 2862 - RNA, 144 nt, synthetic construct
  source 1..144: mol_type = other RNA; note = pegRNA
tgcactcacactgcccagaggttttagagctagaaatagcaagttaaaataaggctagtccgttatcaacttgaaaaagtggcaccgagtcggtgcggctcagtgaacaaattctgcaatccgcactctgggcagtgtgatttt

SEQ ID NO: 2863 - RNA, 144 nt, synthetic construct
  source 1..144: mol_type = other RNA; note = pegRNA
tgcactcacactgcccagaggttttagagctagaaatagcaagttaaaataaggctagtccgttatcaacttgaaaaagtggcaccgagtcggtgctcagtgaacaaattctgcaatccacactctgggcagtgtgagtgtttt

SEQ ID NO: 2864 - RNA, 144 nt, synthetic construct
  source 1..144: mol_type = other RNA; note = pegRNA
tgcactcacactgcccagaggttttagagctagaaatagcaagttaaaataaggctagtccgttatcaacttgaaaaagtggcaccgagtcggtgctcagtgaacaaattctgcaatccgcactctgggcagtgtgagtgtttt

SEQ ID NO: 2865 - RNA, 144 nt, synthetic construct
  source 1..144: mol_type = other RNA; note = pegRNA
tgcactcacactgcccagaggttttagagctagaaatagcaagttaaaataaggctagtccgttatcaacttgaaaaagtggcaccgagtcggtgctccatggctcagtgaacaaattctgcaatccacactctgggcagtgtg

SEQ ID NO: 2866 - RNA, 144 nt, synthetic construct
  source 1..144: mol_type = other RNA; note = pegRNA
tgcactcacactgcccagaggttttagagctagaaatagcaagttaaaataaggctagtccgttatcaacttgaaaaagtggcaccgagtcggtgctccatggctcagtgaacaaattctgcaatccgcactctgggcagtgtg

SEQ ID NO: 2867 - RNA, 144 nt, synthetic construct
  source 1..144: mol_type = other RNA; note = pegRNA
tgcactcacactgcccagaggttttagagctagaaatagcaagttaaaataaggctagtccgttatcaacttgaaaaagtggcaccgagtcggtgctggctcagtgaacaaattctgcaatccacactctgggcagtgtgagtg

SEQ ID NO: 2868 - RNA, 144 nt, synthetic construct
  source 1..144: mol_type = other RNA; note = pegRNA
tgcactcacactgcccagaggttttagagctagaaatagcaagttaaaataaggctagtccgttatcaacttgaaaaagtggcaccgagtcggtgctggctcagtgaacaaattctgcaatccacactctgggcagtgtgtttt

SEQ ID NO: 2869 - RNA, 144 nt, synthetic construct
  source 1..144: mol_type = other RNA; note = pegRNA
tgcactcacactgcccagaggttttagagctagaaatagcaagttaaaataaggctagtccgttatcaacttgaaaaagtggcaccgagtcggtgctggctcagtgaacaaattctgcaatccgcactctgggcagtgtgagtg

SEQ ID NO: 2870 - RNA, 144 nt, synthetic construct
  source 1..144: mol_type = other RNA; note = pegRNA
tgcactcacactgcccagaggttttagagctagaaatagcaagttaaaataaggctagtccgttatcaacttgaaaaagtggcaccgagtcggtgctggctcagtgaacaaattctgcaatccgcactctgggcagtgtgtttt

SEQ ID NO: 2871 - RNA, 145 nt, synthetic construct
  source 1..145: mol_type = other RNA; note = pegRNA
tgcactcacactgcccagaggttttagagctagaaatagcaagttaaaataaggctagtccgttatcaacttgaaaaagtggcaccgagtcggtgcacctccatggctcagtgaacaaattctgcaatccacactctgggcagtg

SEQ ID NO: 2872 - RNA, 145 nt, synthetic construct
  source 1..145: mol_type = other RNA; note = pegRNA
tgcactcacactgcccagaggttttagagctagaaatagcaagttaaaataaggctagtccgttatcaacttgaaaaagtggcaccgagtcggtgcacctccatggctcagtgaacaaattctgcaatccgcactctgggcagtg

SEQ ID NO: 2873 - RNA, 145 nt, synthetic construct
  source 1..145: mol_type = other RNA; note = pegRNA
tgcactcacactgcccagaggttttagagctagaaatagcaagttaaaataaggctagtccgttatcaacttgaaaaagtggcaccgagtcggtgcatggctcagtgaacaaattctgcaatccacactctgggcagtgtgagtg

SEQ ID NO: 2874 - RNA, 145 nt, synthetic construct
  source 1..145: mol_type = other RNA; note = pegRNA
tgcactcacactgcccagaggttttagagctagaaatagcaagttaaaataaggctagtccgttatcaacttgaaaaagtggcaccgagtcggtgcatggctcagtgaacaaattctgcaatccacactctgggcagtgtgtttt

SEQ ID NO: 2875 - RNA, 145 nt, synthetic construct
  source 1..145: mol_type = other RNA; note = pegRNA
tgcactcacactgcccagaggttttagagctagaaatagcaagttaaaataaggctagtccgttatcaacttgaaaaagtggcaccgagtcggtgcatggctcagtgaacaaattctgcaatccgcactctgggcagtgtgagtg

SEQ ID NO: 2876 - RNA, 145 nt, synthetic construct
  source 1..145: mol_type = other RNA; note = pegRNA
tgcactcacactgcccagaggttttagagctagaaatagcaagttaaaataaggctagtccgttatcaacttgaaaaagtggcaccgagtcggtgcatggctcagtgaacaaattctgcaatccgcactctgggcagtgtgtttt

SEQ ID NO: 2877 - RNA, 145 nt, synthetic construct
  source 1..145: mol_type = other RNA; note = pegRNA
tgcactcacactgcccagaggttttagagctagaaatagcaagttaaaataaggctagtccgttatcaacttgaaaaagtggcaccgagtcggtgccatggctcagtgaacaaattctgcaatccacactctgggcagtgtgagt

SEQ ID NO: 2878 - RNA, 145 nt, synthetic construct
  source 1..145: mol_type = other RNA; note = pegRNA
tgcactcacactgcccagaggttttagagctagaaatagcaagttaaaataaggctagtccgttatcaacttgaaaaagtggcaccgagtcggtgccatggctcagtgaacaaattctgcaatccacactctgggcagtgttttt

SEQ ID NO: 2879 - RNA, 145 nt, synthetic construct
  source 1..145: mol_type = other RNA; note = pegRNA
tgcactcacactgcccagaggttttagagctagaaatagcaagttaaaataaggctagtccgttatcaacttgaaaaagtggcaccgagtcggtgccatggctcagtgaacaaattctgcaatccgcactctgggcagtgtgagt

SEQ ID NO: 2880 - RNA, 145 nt, synthetic construct
  source 1..145: mol_type = other RNA; note = pegRNA
tgcactcacactgcccagaggttttagagctagaaatagcaagttaaaataaggctagtccgttatcaacttgaaaaagtggcaccgagtcggtgccatggctcagtgaacaaattctgcaatccgcactctgggcagtgttttt

SEQ ID NO: 2881 - RNA, 145 nt, synthetic construct
  source 1..145: mol_type = other RNA; note = pegRNA
tgcactcacactgcccagaggttttagagctagaaatagcaagttaaaataaggctagtccgttatcaacttgaaaaagtggcaccgagtcggtgcccatggctcagtgaacaaattctgcaatccacactctgggcagtgtgag

SEQ ID NO: 2882 - RNA, 145 nt, synthetic construct
  source 1..145: mol_type = other RNA; note = pegRNA
tgcactcacactgcccagaggttttagagctagaaatagcaagttaaaataaggctagtccgttatcaacttgaaaaagtggcaccgagtcggtgcccatggctcagtgaacaaattctgcaatccacactctgggcagtgtttt

SEQ ID NO: 2883 - RNA, 145 nt, synthetic construct
  source 1..145: mol_type = other RNA; note = pegRNA
tgcactcacactgcccagaggttttagagctagaaatagcaagttaaaataaggctagtccgttatcaacttgaaaaagtggcaccgagtcggtgcccatggctcagtgaacaaattctgcaatccgcactctgggcagtgtgag

SEQ ID NO: 2884 - RNA, 145 nt, synthetic construct
  source 1..145: mol_type = other RNA; note = pegRNA
tgcactcacactgcccagaggttttagagctagaaatagcaagttaaaataaggctagtccgttatcaacttgaaaaagtggcaccgagtcggtgcccatggctcagtgaacaaattctgcaatccgcactctgggcagtgtttt

SEQ ID NO: 2885 - RNA, 145 nt, synthetic construct
  source 1..145: mol_type = other RNA; note = pegRNA
tgcactcacactgcccagaggttttagagctagaaatagcaagttaaaataaggctagtccgttatcaacttgaaaaagtggcaccgagtcggtgccctccatggctcagtgaacaaattctgcaatccacactctgggcagtgt

SEQ ID NO: 2886 - RNA, 145 nt, synthetic construct
  source 1..145: mol_type = other RNA; note = pegRNA
tgcactcacactgcccagaggttttagagctagaaatagcaagttaaaataaggctagtccgttatcaacttgaaaaagtggcaccgagtcggtgccctccatggctcagtgaacaaattctgcaatccgcactctgggcagtgt

SEQ ID NO: 2887 - RNA, 145 nt, synthetic construct
  source 1..145: mol_type = other RNA; note = pegRNA
tgcactcacactgcccagaggttttagagctagaaatagcaagttaaaataaggctagtccgttatcaacttgaaaaagtggcaccgagtcggtgcctcagtgaacaaattctgcaatccacactctgggcagtgtgagtgtttt

SEQ ID NO: 2888 - RNA, 145 nt, synthetic construct
  source 1..145: mol_type = other RNA; note = pegRNA
tgcactcacactgcccagaggttttagagctagaaatagcaagttaaaataaggctagtccgttatcaacttgaaaaagtggcaccgagtcggtgcctcagtgaacaaattctgcaatccgcactctgggcagtgtgagtgtttt

SEQ ID NO: 2889 - RNA, 145 nt, synthetic construct
  source 1..145: mol_type = other RNA; note = pegRNA
tgcactcacactgcccagaggttttagagctagaaatagcaagttaaaataaggctagtccgttatcaacttgaaaaagtggcaccgagtcggtgcctccatggctcagtgaacaaattctgcaatccacactctgggcagtgtg

SEQ ID NO: 2890 - RNA, 145 nt, synthetic construct
  source 1..145: mol_type = other RNA; note = pegRNA
tgcactcacactgcccagaggttttagagctagaaatagcaagttaaaataaggctagtccgttatcaacttgaaaaagtggcaccgagtcggtgcctccatggctcagtgaacaaattctgcaatccgcactctgggcagtgtg

SEQ ID NO: 2891 - RNA, 145 nt, synthetic construct
  source 1..145: mol_type = other RNA; note = pegRNA
tgcactcacactgcccagaggttttagagctagaaatagcaagttaaaataaggctagtccgttatcaacttgaaaaagtggcaccgagtcggtgcgctcagtgaacaaattctgcaatccacactctgggcagtgtgagttttt

SEQ ID NO: 2892 - RNA, 145 nt, synthetic construct
  source 1..145: mol_type = other RNA; note = pegRNA
tgcactcacactgcccagaggttttagagctagaaatagcaagttaaaataaggctagtccgttatcaacttgaaaaagtggcaccgagtcggtgcgctcagtgaacaaattctgcaatccgcactctgggcagtgtgagttttt

SEQ ID NO: 2893 - RNA, 145 nt, synthetic construct
  source 1..145: mol_type = other RNA; note = pegRNA
tgcactcacactgcccagaggttttagagctagaaatagcaagttaaaataaggctagtccgttatcaacttgaaaaagtggcaccgagtcggtgcggctcagtgaacaaattctgcaatccacactctgggcagtgtgagtttt

SEQ ID NO: 2894 - RNA, 145 nt, synthetic construct
  source 1..145: mol_type = other RNA; note = pegRNA
tgcactcacactgcccagaggttttagagctagaaatagcaagttaaaataaggctagtccgttatcaacttgaaaaagtggcaccgagtcggtgcggctcagtgaacaaattctgcaatccgcactctgggcagtgtgagtttt

SEQ ID NO: 2895 - RNA, 145 nt, synthetic construct
  source 1..145: mol_type = other RNA; note = pegRNA
tgcactcacactgcccagaggttttagagctagaaatagcaagttaaaataaggctagtccgttatcaacttgaaaaagtggcaccgagtcggtgctcagtgaacaaattctgcaatccacactctgggcagtgtgagtgctttt

SEQ ID NO: 2896 - RNA, 145 nt, synthetic construct
  source 1..145: mol_type = other RNA; note = pegRNA
tgcactcacactgcccagaggttttagagctagaaatagcaagttaaaataaggctagtccgttatcaacttgaaaaagtggcaccgagtcggtgctcagtgaacaaattctgcaatccgcactctgggcagtgtgagtgctttt

SEQ ID NO: 2897 - RNA, 145 nt, synthetic construct
  source 1..145: mol_type = other RNA; note = pegRNA
tgcactcacactgcccagaggttttagagctagaaatagcaagttaaaataaggctagtccgttatcaacttgaaaaagtggcaccgagtcggtgctccatggctcagtgaacaaattctgcaatccacactctgggcagtgtga

SEQ ID NO: 2898 - RNA, 145 nt, synthetic construct
  source 1..145: mol_type = other RNA; note = pegRNA
tgcactcacactgcccagaggttttagagctagaaatagcaagttaaaataaggctagtccgttatcaacttgaaaaagtggcaccgagtcggtgctccatggctcagtgaacaaattctgcaatccacactctgggcagttttt

SEQ ID NO: 2899 - RNA, 145 nt, synthetic construct
  source 1..145: mol_type = other RNA; note = pegRNA
tgcactcacactgcccagaggttttagagctagaaatagcaagttaaaataaggctagtccgttatcaacttgaaaaagtggcaccgagtcggtgctccatggctcagtgaacaaattctgcaatccgcactctgggcagtgtga

SEQ ID NO: 2900 - RNA, 145 nt, synthetic construct
  source 1..145: mol_type = other RNA; note = pegRNA
tgcactcacactgcccagaggttttagagctagaaatagcaagttaaaataaggctagtccgttatcaacttgaaaaagtggcaccgagtcggtgctccatggctcagtgaacaaattctgcaatccgcactctgggcagttttt

SEQ ID NO: 2901 - RNA, 145 nt, synthetic construct
  source 1..145: mol_type = other RNA; note = pegRNA
tgcactcacactgcccagaggttttagagctagaaatagcaagttaaaataaggctagtccgttatcaacttgaaaaagtggcaccgagtcggtgctggctcagtgaacaaattctgcaatccacactctgggcagtgtgagtgc

SEQ ID NO: 2902 - RNA, 145 nt, synthetic construct
  source 1..145: mol_type = other RNA; note = pegRNA
tgcactcacactgcccagaggttttagagctagaaatagcaagttaaaataaggctagtccgttatcaacttgaaaaagtggcaccgagtcggtgctggctcagtgaacaaattctgcaatccacactctgggcagtgtgatttt

SEQ ID NO: 2903 - RNA, 145 nt, synthetic construct
  source 1..145: mol_type = other RNA; note = pegRNA
tgcactcacactgcccagaggttttagagctagaaatagcaagttaaaataaggctagtccgttatcaacttgaaaaagtggcaccgagtcggtgctggctcagtgaacaaattctgcaatccgcactctgggcagtgtgagtgc

SEQ ID NO: 2904 - RNA, 145 nt, synthetic construct
  source 1..145: mol_type = other RNA; note = pegRNA
tgcactcacactgcccagaggttttagagctagaaatagcaagttaaaataaggctagtccgttatcaacttgaaaaagtggcaccgagtcggtgctggctcagtgaacaaattctgcaatccgcactctgggcagtgtgatttt

SEQ ID NO: 2905 - RNA, 146 nt, synthetic construct
  source 1..146: mol_type = other RNA; note = pegRNA
tgcactcacactgcccagaggttttagagctagaaatagcaagttaaaataaggctagtccgttatcaacttgaaaaagtggcaccgagtcggtgcacctccatggctcagtgaacaaattctgcaatccacactctgggcagtgt

SEQ ID NO: 2906 - RNA, 146 nt, synthetic construct
  source 1..146: mol_type = other RNA; note = pegRNA
tgcactcacactgcccagaggttttagagctagaaatagcaagttaaaataaggctagtccgttatcaacttgaaaaagtggcaccgagtcggtgcacctccatggctcagtgaacaaattctgcaatccgcactctgggcagtgt

SEQ ID NO: 2907 - RNA, 146 nt, synthetic construct
  source 1..146: mol_type = other RNA; note = pegRNA
tgcactcacactgcccagaggttttagagctagaaatagcaagttaaaataaggctagtccgttatcaacttgaaaaagtggcaccgagtcggtgcatggctcagtgaacaaattctgcaatccacactctgggcagtgtgagtgc

SEQ ID NO: 2908 - RNA, 146 nt, synthetic construct
  source 1..146: mol_type = other RNA; note = pegRNA
tgcactcacactgcccagaggttttagagctagaaatagcaagttaaaataaggctagtccgttatcaacttgaaaaagtggcaccgagtcggtgcatggctcagtgaacaaattctgcaatccacactctgggcagtgtgatttt

SEQ ID NO: 2909 - RNA, 146 nt, synthetic construct
  source 1..146: mol_type = other RNA; note = pegRNA
tgcactcacactgcccagaggttttagagctagaaatagcaagttaaaataaggctagtccgttatcaacttgaaaaagtggcaccgagtcggtgcatggctcagtgaacaaattctgcaatccgcactctgggcagtgtgagtgc

SEQ ID NO: 2910 - RNA, 146 nt, synthetic construct
  source 1..146: mol_type = other RNA; note = pegRNA
tgcactcacactgcccagaggttttagagctagaaatagcaagttaaaataaggctagtccgttatcaacttgaaaaagtggcaccgagtcggtgcatggctcagtgaacaaattctgcaatccgcactctgggcagtgtgatttt

SEQ ID NO: 2911 - RNA, 146 nt, synthetic construct
  source 1..146: mol_type = other RNA; note = pegRNA
tgcactcacactgcccagaggttttagagctagaaatagcaagttaaaataaggctagtccgttatcaacttgaaaaagtggcaccgagtcggtgccatggctcagtgaacaaattctgcaatccacactctgggcagtgtgagtg

SEQ ID NO: 2912 - RNA, 146 nt, synthetic construct
  source 1..146: mol_type = other RNA; note = pegRNA
tgcactcacactgcccagaggttttagagctagaaatagcaagttaaaataaggctagtccgttatcaacttgaaaaagtggcaccgagtcggtgccatggctcagtgaacaaattctgcaatccacactctgggcagtgtgtttt

SEQ ID NO: 2913 - RNA, 146 nt, synthetic construct
  source 1..146: mol_type = other RNA; note = pegRNA
tgcactcacactgcccagaggttttagagctagaaatagcaagttaaaataaggctagtccgttatcaacttgaaaaagtggcaccgagtcggtgccatggctcagtgaacaaattctgcaatccgcactctgggcagtgtgagtg

SEQ ID NO: 2914 - RNA, 146 nt, synthetic construct
  source 1..146: mol_type = other RNA; note = pegRNA
tgcactcacactgcccagaggttttagagctagaaatagcaagttaaaataaggctagtccgttatcaacttgaaaaagtggcaccgagtcggtgccatggctcagtgaacaaattctgcaatccgcactctgggcagtgtgtttt

SEQ ID NO: 2915 - RNA, 146 nt, synthetic construct
  source 1..146: mol_type = other RNA; note = pegRNA
tgcactcacactgcccagaggttttagagctagaaatagcaagttaaaataaggctagtccgttatcaacttgaaaaagtggcaccgagtcggtgcccatggctcagtgaacaaattctgcaatccacactctgggcagtgtgagt

SEQ ID NO: 2916 - RNA, 146 nt, synthetic construct
  source 1..146: mol_type = other RNA; note = pegRNA
tgcactcacactgcccagaggttttagagctagaaatagcaagttaaaataaggctagtccgttatcaacttgaaaaagtggcaccgagtcggtgcccatggctcagtgaacaaattctgcaatccacactctgggcagtgttttt

SEQ ID NO: 2917 - RNA, 146 nt, synthetic construct
  source 1..146: mol_type = other RNA; note = pegRNA
tgcactcacactgcccagaggttttagagctagaaatagcaagttaaaataaggctagtccgttatcaacttgaaaaagtggcaccgagtcggtgcccatggctcagtgaacaaattctgcaatccgcactctgggcagtgtgagt

SEQ ID NO: 2918 - RNA, 146 nt, synthetic construct
  source 1..146: mol_type = other RNA; note = pegRNA
tgcactcacactgcccagaggttttagagctagaaatagcaagttaaaataaggctagtccgttatcaacttgaaaaagtggcaccgagtcggtgcccatggctcagtgaacaaattctgcaatccgcactctgggcagtgttttt

SEQ ID NO: 2919 - RNA, 146 nt, synthetic construct
  source 1..146: mol_type = other RNA; note = pegRNA
tgcactcacactgcccagaggttttagagctagaaatagcaagttaaaataaggctagtccgttatcaacttgaaaaagtggcaccgagtcggtgccctccatggctcagtgaacaaattctgcaatccacactctgggcagtgtg

SEQ ID NO: 2920 - RNA, 146 nt, synthetic construct
  source 1..146: mol_type = other RNA; note = pegRNA
tgcactcacactgcccagaggttttagagctagaaatagcaagttaaaataaggctagtccgttatcaacttgaaaaagtggcaccgagtcggtgccctccatggctcagtgaacaaattctgcaatccgcactctgggcagtgtg

SEQ ID NO: 2921 - RNA, 146 nt, synthetic construct
  source 1..146: mol_type = other RNA; note = pegRNA
tgcactcacactgcccagaggttttagagctagaaatagcaagttaaaataaggctagtccgttatcaacttgaaaaagtggcaccgagtcggtgcctcagtgaacaaattctgcaatccacactctgggcagtgtgagtgctttt

SEQ ID NO: 2922 - RNA, 146 nt, synthetic construct
  source 1..146: mol_type = other RNA; note = pegRNA
tgcactcacactgcccagaggttttagagctagaaatagcaagttaaaataaggctagtccgttatcaacttgaaaaagtggcaccgagtcggtgcctcagtgaacaaattctgcaatccgcactctgggcagtgtgagtgctttt

SEQ ID NO: 2923 - RNA, 146 nt, synthetic construct
  source 1..146: mol_type = other RNA; note = pegRNA
tgcactcacactgcccagaggttttagagctagaaatagcaagttaaaataaggctagtccgttatcaacttgaaaaagtggcaccgagtcggtgcctccatggctcagtgaacaaattctgcaatccacactctgggcagtgtga

SEQ ID NO: 2924 - RNA, 146 nt, synthetic construct
  source 1..146: mol_type = other RNA; note = pegRNA
tgcactcacactgcccagaggttttagagctagaaatagcaagttaaaataaggctagtccgttatcaacttgaaaaagtggcaccgagtcggtgcctccatggctcagtgaacaaattctgcaatccacactctgggcagttttt

SEQ ID NO: 2925 - RNA, 146 nt, synthetic construct
  source 1..146: mol_type = other RNA; note = pegRNA
tgcactcacactgcccagaggttttagagctagaaatagcaagttaaaataaggctagtccgttatcaacttgaaaaagtggcaccgagtcggtgcctccatggctcagtgaacaaattctgcaatccgcactctgggcagtgtga

SEQ ID NO: 2926 - RNA, 146 nt, synthetic construct
  source 1..146: mol_type = other RNA; note = pegRNA
tgcactcacactgcccagaggttttagagctagaaatagcaagttaaaataaggctagtccgttatcaacttgaaaaagtggcaccgagtcggtgcctccatggctcagtgaacaaattctgcaatccgcactctgggcagttttt

SEQ ID NO: 2927 - RNA, 146 nt, synthetic construct
  source 1..146: mol_type = other RNA; note = pegRNA
tgcactcacactgcccagaggttttagagctagaaatagcaagttaaaataaggctagtccgttatcaacttgaaaaagtggcaccgagtcggtgcgctcagtgaacaaattctgcaatccacactctgggcagtgtgagtgtttt

SEQ ID NO: 2928 - RNA, 146 nt, synthetic construct
  source 1..146: mol_type = other RNA; note = pegRNA
tgcactcacactgcccagaggttttagagctagaaatagcaagttaaaataaggctagtccgttatcaacttgaaaaagtggcaccgagtcggtgcgctcagtgaacaaattctgcaatccgcactctgggcagtgtgagtgtttt

SEQ ID NO: 2929 - RNA, 146 nt, synthetic construct
  source 1..146: mol_type = other RNA; note = pegRNA
tgcactcacactgcccagaggttttagagctagaaatagcaagttaaaataaggctagtccgttatcaacttgaaaaagtggcaccgagtcggtgcggctcagtgaacaaattctgcaatccacactctgggcagtgtgagttttt

SEQ ID NO: 2930 - RNA, 146 nt, synthetic construct
  source 1..146: mol_type = other RNA; note = pegRNA
tgcactcacactgcccagaggttttagagctagaaatagcaagttaaaataaggctagtccgttatcaacttgaaaaagtggcaccgagtcggtgcggctcagtgaacaaattctgcaatccgcactctgggcagtgtgagttttt

SEQ ID NO: 2931 - RNA, 146 nt, synthetic construct
  source 1..146: mol_type = other RNA; note = pegRNA
tgcactcacactgcccagaggttttagagctagaaatagcaagttaaaataaggctagtccgttatcaacttgaaaaagtggcaccgagtcggtgctccatggctcagtgaacaaattctgcaatccacactctgggcagtgtgag

SEQ ID NO: 2932 - RNA, 146 nt, synthetic construct
  source 1..146: mol_type = other RNA; note = pegRNA
tgcactcacactgcccagaggttttagagctagaaatagcaagttaaaataaggctagtccgttatcaacttgaaaaagtggcaccgagtcggtgctccatggctcagtgaacaaattctgcaatccacactctgggcagtgtttt

SEQ ID NO: 2933 - RNA, 146 nt, synthetic construct
  source 1..146: mol_type = other RNA; note = pegRNA
tgcactcacactgcccagaggttttagagctagaaatagcaagttaaaataaggctagtccgttatcaacttgaaaaagtggcaccgagtcggtgctccatggctcagtgaacaaattctgcaatccgcactctgggcagtgtgag

SEQ ID NO: 2934 - RNA, 146 nt, synthetic construct
  source 1..146: mol_type = other RNA; note = pegRNA
tgcactcacactgcccagaggttttagagctagaaatagcaagttaaaataaggctagtccgttatcaacttgaaaaagtggcaccgagtcggtgctccatggctcagtgaacaaattctgcaatccgcactctgggcagtgtttt

SEQ ID NO: 2935 - RNA, 146 nt, synthetic construct
  source 1..146: mol_type = other RNA; note = pegRNA
tgcactcacactgcccagaggttttagagctagaaatagcaagttaaaataaggctagtccgttatcaacttgaaaaagtggcaccgagtcggtgctggctcagtgaacaaattctgcaatccacactctgggcagtgtgagtttt

SEQ ID NO: 2936 - RNA, 146 nt, synthetic construct
  source 1..146: mol_type = other RNA; note = pegRNA
tgcactcacactgcccagaggttttagagctagaaatagcaagttaaaataaggctagtccgttatcaacttgaaaaagtggcaccgagtcggtgctggctcagtgaacaaattctgcaatccgcactctgggcagtgtgagtttt

SEQ ID NO: 2937 - RNA, 147 nt, synthetic construct
  source 1..147: mol_type = other RNA; note = pegRNA
tgcactcacactgcccagaggttttagagctagaaatagcaagttaaaataaggctagtccgttatcaacttgaaaaagtggcaccgagtcggtgcacctccatggctcagtgaacaaattctgcaatccacactctgggcagtgtg

SEQ ID NO: 2938 - RNA, 147 nt, synthetic construct
  source 1..147: mol_type = other RNA; note = pegRNA
tgcactcacactgcccagaggttttagagctagaaatagcaagttaaaataaggctagtccgttatcaacttgaaaaagtggcaccgagtcggtgcacctccatggctcagtgaacaaattctgcaatccgcactctgggcagtgtg

SEQ ID NO: 2939 - RNA, 147 nt, synthetic construct
  source 1..147: mol_type = other RNA; note = pegRNA
tgcactcacactgcccagaggttttagagctagaaatagcaagttaaaataaggctagtccgttatcaacttgaaaaagtggcaccgagtcggtgcatggctcagtgaacaaattctgcaatccacactctgggcagtgtgagtttt

SEQ ID NO: 2940 - RNA, 147 nt, synthetic construct
  source 1..147: mol_type = other RNA; note = pegRNA
tgcactcacactgcccagaggttttagagctagaaatagcaagttaaaataaggctagtccgttatcaacttgaaaaagtggcaccgagtcggtgcatggctcagtgaacaaattctgcaatccgcactctgggcagtgtgagtttt

SEQ ID NO: 2941 - RNA, 147 nt, synthetic construct
  source 1..147: mol_type = other RNA; note = pegRNA
tgcactcacactgcccagaggttttagagctagaaatagcaagttaaaataaggctagtccgttatcaacttgaaaaagtggcaccgagtcggtgccatggctcagtgaacaaattctgcaatccacactctgggcagtgtgagtgc

SEQ ID NO: 2942 - RNA, 147 nt, synthetic construct
  source 1..147: mol_type = other RNA; note = pegRNA
tgcactcacactgcccagaggttttagagctagaaatagcaagttaaaataaggctagtccgttatcaacttgaaaaagtggcaccgagtcggtgccatggctcagtgaacaaattctgcaatccacactctgggcagtgtgatttt

SEQ ID NO: 2943 - RNA, 147 nt, synthetic construct
  source 1..147: mol_type = other RNA; note = pegRNA
tgcactcacactgcccagaggttttagagctagaaatagcaagttaaaataaggctagtccgttatcaacttgaaaaagtggcaccgagtcggtgccatggctcagtgaacaaattctgcaatccgcactctgggcagtgtgagtgc

SEQ ID NO: 2944 - RNA, 147 nt, synthetic construct
  source 1..147: mol_type = other RNA; note = pegRNA
tgcactcacactgcccagaggttttagagctagaaatagcaagttaaaataaggctagtccgttatcaacttgaaaaagtggcaccgagtcggtgccatggctcagtgaacaaattctgcaatccgcactctgggcagtgtgatttt

SEQ ID NO: 2945 - RNA, 147 nt, synthetic construct
  source 1..147: mol_type = other RNA; note = pegRNA
tgcactcacactgcccagaggttttagagctagaaatagcaagttaaaataaggctagtccgttatcaacttgaaaaagtggcaccgagtcggtgcccatggctcagtgaacaaattctgcaatccacactctgggcagtgtgagtg

SEQ ID NO: 2946 - RNA, 147 nt, synthetic construct
  source 1..147: mol_type = other RNA; note = pegRNA
tgcactcacactgcccagaggttttagagctagaaatagcaagttaaaataaggctagtccgttatcaacttgaaaaagtggcaccgagtcggtgcccatggctcagtgaacaaattctgcaatccacactctgggcagtgtgtttt

SEQ ID NO: 2947 - RNA, 147 nt, synthetic construct
  source 1..147: mol_type = other RNA; note = pegRNA
tgcactcacactgcccagaggttttagagctagaaatagcaagttaaaataaggctagtccgttatcaacttgaaaaagtggcaccgagtcggtgcccatggctcagtgaacaaattctgcaatccgcactctgggcagtgtgagtg

SEQ ID NO: 2948 - RNA, 147 nt, synthetic construct
  source 1..147: mol_type = other RNA; note = pegRNA
tgcactcacactgcccagaggttttagagctagaaatagcaagttaaaataaggctagtccgttatcaacttgaaaaagtggcaccgagtcggtgcccatggctcagtgaacaaattctgcaatccgcactctgggcagtgtgtttt

SEQ ID NO: 2949 - RNA, 147 nt, synthetic construct
  source 1..147: mol_type = other RNA; note = pegRNA
tgcactcacactgcccagaggttttagagctagaaatagcaagttaaaataaggctagtccgttatcaacttgaaaaagtggcaccgagtcggtgccctccatggctcagtgaacaaattctgcaatccacactctgggcagtgtga

SEQ ID NO: 2950 - RNA, 147 nt, synthetic construct
  source 1..147: mol_type = other RNA; note = pegRNA
tgcactcacactgcccagaggttttagagctagaaatagcaagttaaaataaggctagtccgttatcaacttgaaaaagtggcaccgagtcggtgccctccatggctcagtgaacaaattctgcaatccacactctgggcagttttt

SEQ ID NO: 2951 - RNA, 147 nt, synthetic construct
  source 1..147: mol_type = other RNA; note = pegRNA
tgcactcacactgcccagaggttttagagctagaaatagcaagttaaaataaggctagtccgttatcaacttgaaaaagtggcaccgagtcggtgccctccatggctcagtgaacaaattctgcaatccgcactctgggcagtgtga

SEQ ID NO: 2952 - RNA, 147 nt, synthetic construct
  source 1..147: mol_type = other RNA; note = pegRNA
tgcactcacactgcccagaggttttagagctagaaatagcaagttaaaataaggctagtccgttatcaacttgaaaaagtggcaccgagtcggtgccctccatggctcagtgaacaaattctgcaatccgcactctgggcagttttt

SEQ ID NO: 2953 - RNA, 147 nt, synthetic construct
  source 1..147: mol_type = other RNA; note = pegRNA
tgcactcacactgcccagaggttttagagctagaaatagcaagttaaaataaggctagtccgttatcaacttgaaaaagtggcaccgagtcggtgcctccatggctcagtgaacaaattctgcaatccacactctgggcagtgtgag

SEQ ID NO: 2954 - RNA, 147 nt, synthetic construct
  source 1..147: mol_type = other RNA; note = pegRNA
tgcactcacactgcccagaggttttagagctagaaatagcaagttaaaataaggctagtccgttatcaacttgaaaaagtggcaccgagtcggtgcctccatggctcagtgaacaaattctgcaatccacactctgggcagtgtttt

SEQ ID NO: 2955 - RNA, 147 nt, synthetic construct
  source 1..147: mol_type = other RNA; note = pegRNA
tgcactcacactgcccagaggttttagagctagaaatagcaagttaaaataaggctagtccgttatcaacttgaaaaagtggcaccgagtcggtgcctccatggctcagtgaacaaattctgcaatccgcactctgggcagtgtgag

SEQ ID NO: 2956 - RNA, 147 nt, synthetic construct
  source 1..147: mol_type = other RNA; note = pegRNA
tgcactcacactgcccagaggttttagagctagaaatagcaagttaaaataaggctagtccgttatcaacttgaaaaagtggcaccgagtcggtgcctccatggctcagtgaacaaattctgcaatccgcactctgggcagtgtttt

SEQ ID NO: 2957 - RNA, 147 nt, synthetic construct
  source 1..147: mol_type = other RNA; note = pegRNA
tgcactcacactgcccagaggttttagagctagaaatagcaagttaaaataaggctagtccgttatcaacttgaaaaagtggcaccgagtcggtgcgctcagtgaacaaattctgcaatccacactctgggcagtgtgagtgctttt

SEQ ID NO: 2958 - RNA, 147 nt, synthetic construct
  source 1..147: mol_type = other RNA; note = pegRNA
tgcactcacactgcccagaggttttagagctagaaatagcaagttaaaataaggctagtccgttatcaacttgaaaaagtggcaccgagtcggtgcgctcagtgaacaaattctgcaatccgcactctgggcagtgtgagtgctttt

SEQ ID NO: 2959 - RNA, 147 nt, synthetic construct
  source 1..147: mol_type = other RNA; note = pegRNA
tgcactcacactgcccagaggttttagagctagaaatagcaagttaaaataaggctagtccgttatcaacttgaaaaagtggcaccgagtcggtgcggctcagtgaacaaattctgcaatccacactctgggcagtgtgagtgtttt

SEQ ID NO: 2960 - RNA, 147 nt, synthetic construct
  source 1..147: mol_type = other RNA; note = pegRNA
tgcactcacactgcccagaggttttagagctagaaatagcaagttaaaataaggctagtccgttatcaacttgaaaaagtggcaccgagtcggtgcggctcagtgaacaaattctgcaatccgcactctgggcagtgtgagtgtttt

SEQ ID NO: 2961 - RNA, 147 nt, synthetic construct
  source 1..147: mol_type = other RNA; note = pegRNA
tgcactcacactgcccagaggttttagagctagaaatagcaagttaaaataaggctagtccgttatcaacttgaaaaagtggcaccgagtcggtgctccatggctcagtgaacaaattctgcaatccacactctgggcagtgtgagt

SEQ ID NO: 2962 - RNA, 147 nt, synthetic construct
  source 1..147: mol_type = other RNA; note = pegRNA
tgcactcacactgcccagaggttttagagctagaaatagcaagttaaaataaggctagtccgttatcaacttgaaaaagtggcaccgagtcggtgctccatggctcagtgaacaaattctgcaatccacactctgggcagtgttttt

SEQ ID NO: 2963 - RNA, 147 nt, synthetic construct
  source 1..147: mol_type = other RNA; note = pegRNA
tgcactcacactgcccagaggttttagagctagaaatagcaagttaaaataaggctagtccgttatcaacttgaaaaagtggcaccgagtcggtgctccatggctcagtgaacaaattctgcaatccgcactctgggcagtgtgagt

SEQ ID NO: 2964 - RNA, 147 nt, synthetic construct
  source 1..147: mol_type = other RNA; note = pegRNA
tgcactcacactgcccagaggttttagagctagaaatagcaagttaaaataaggctagtccgttatcaacttgaaaaagtggcaccgagtcggtgctccatggctcagtgaacaaattctgcaatccgcactctgggcagtgttttt

SEQ ID NO: 2965 - RNA, 147 nt, synthetic construct
  source 1..147: mol_type = other RNA; note = pegRNA
tgcactcacactgcccagaggttttagagctagaaatagcaagttaaaataaggctagtccgttatcaacttgaaaaagtggcaccgagtcggtgctggctcagtgaacaaattctgcaatccacactctgggcagtgtgagttttt

SEQ ID NO: 2966 - RNA, 147 nt, synthetic construct
  source 1..147: mol_type = other RNA; note = pegRNA
tgcactcacactgcccagaggttttagagctagaaatagcaagttaaaataaggctagtccgttatcaacttgaaaaagtggcaccgagtcggtgctggctcagtgaacaaattctgcaatccgcactctgggcagtgtgagttttt

SEQ ID NO: 2967 - RNA, 148 nt, synthetic construct
  source 1..148: mol_type = other RNA; note = pegRNA
tgcactcacactgcccagaggttttagagctagaaatagcaagttaaaataaggctagtccgttatcaacttgaaaaagtggcaccgagtcggtgcacctccatggctcagtgaacaaattctgcaatccacactctgggcagtgtga

SEQ ID NO: 2968 - RNA, 148 nt, synthetic construct
  source 1..148: mol_type = other RNA; note = pegRNA
tgcactcacactgcccagaggttttagagctagaaatagcaagttaaaataaggctagtccgttatcaacttgaaaaagtggcaccgagtcggtgcacctccatggctcagtgaacaaattctgcaatccacactctgggcagttttt

SEQ ID NO: 2969 - RNA, 148 nt, synthetic construct
  source 1..148: mol_type = other RNA; note = pegRNA
tgcactcacactgcccagaggttttagagctagaaatagcaagttaaaataaggctagtccgttatcaacttgaaaaagtggcaccgagtcggtgcacctccatggctcagtgaacaaattctgcaatccgcactctgggcagtgtga

SEQ ID NO: 2970 - RNA, 148 nt, synthetic construct
  source 1..148: mol_type = other RNA; note = pegRNA
tgcactcacactgcccagaggttttagagctagaaatagcaagttaaaataaggctagtccgttatcaacttgaaaaagtggcaccgagtcggtgcacctccatggctcagtgaacaaattctgcaatccgcactctgggcagttttt

SEQ ID NO: 2971 - RNA, 148 nt, synthetic construct
  source 1..148: mol_type = other RNA; note = pegRNA
tgcactcacactgcccagaggttttagagctagaaatagcaagttaaaataaggctagtccgttatcaacttgaaaaagtggcaccgagtcggtgcatggctcagtgaacaaattctgcaatccacactctgggcagtgtgagttttt

SEQ ID NO: 2972 - RNA, 148 nt, synthetic construct
  source 1..148: mol_type = other RNA; note = pegRNA
tgcactcacactgcccagaggttttagagctagaaatagcaagttaaaataaggctagtccgttatcaacttgaaaaagtggcaccgagtcggtgcatggctcagtgaacaaattctgcaatccgcactctgggcagtgtgagttttt

SEQ ID NO: 2973 - RNA, 148 nt, synthetic construct
  source 1..148: mol_type = other RNA; note = pegRNA
tgcactcacactgcccagaggttttagagctagaaatagcaagttaaaataaggctagtccgttatcaacttgaaaaagtggcaccgagtcggtgccatggctcagtgaacaaattctgcaatccacactctgggcagtgtgagtttt

SEQ ID NO: 2974 - RNA, 148 nt, synthetic construct
  source 1..148: mol_type = other RNA; note = pegRNA
tgcactcacactgcccagaggttttagagctagaaatagcaagttaaaataaggctagtccgttatcaacttgaaaaagtggcaccgagtcggtgccatggctcagtgaacaaattctgcaatccgcactctgggcagtgtgagtttt

SEQ ID NO: 2975 - RNA, 148 nt, synthetic construct
  source 1..148: mol_type = other RNA; note = pegRNA
tgcactcacactgcccagaggttttagagctagaaatagcaagttaaaataaggctagtccgttatcaacttgaaaaagtggcaccgagtcggtgcccatggctcagtgaacaaattctgcaatccacactctgggcagtgtgagtgc

SEQ ID NO: 2976 - RNA, 148 nt, synthetic construct
  source 1..148: mol_type = other RNA; note = pegRNA
tgcactcacactgcccagaggttttagagctagaaatagcaagttaaaataaggctagtccgttatcaacttgaaaaagtggcaccgagtcggtgcccatggctcagtgaacaaattctgcaatccacactctgggcagtgtgatttt

SEQ ID NO: 2977 - RNA, 148 nt, synthetic construct
  source 1..148: mol_type = other RNA; note = pegRNA
tgcactcacactgcccagaggttttagagctagaaatagcaagttaaaataaggctagtccgttatcaacttgaaaaagtggcaccgagtcggtgcccatggctcagtgaacaaattctgcaatccgcactctgggcagtgtgagtgc

SEQ ID NO: 2978 - RNA, 148 nt, synthetic construct
  source 1..148: mol_type = other RNA; note = pegRNA
tgcactcacactgcccagaggttttagagctagaaatagcaagttaaaataaggctagtccgttatcaacttgaaaaagtggcaccgagtcggtgcccatggctcagtgaacaaattctgcaatccgcactctgggcagtgtgatttt

SEQ ID NO: 2979 - RNA, 148 nt, synthetic construct
  source 1..148: mol_type = other RNA; note = pegRNA
tgcactcacactgcccagaggttttagagctagaaatagcaagttaaaataaggctagtccgttatcaacttgaaaaagtggcaccgagtcggtgccctccatggctcagtgaacaaattctgcaatccacactctgggcagtgtgag

SEQ ID NO: 2980 - RNA, 148 nt, synthetic construct
  source 1..148: mol_type = other RNA; note = pegRNA
tgcactcacactgcccagaggttttagagctagaaatagcaagttaaaataaggctagtccgttatcaacttgaaaaagtggcaccgagtcggtgccctccatggctcagtgaacaaattctgcaatccacactctgggcagtgtttt

SEQ ID NO: 2981 - RNA, 148 nt, synthetic construct
  source 1..148: mol_type = other RNA; note = pegRNA
tgcactcacactgcccagaggttttagagctagaaatagcaagttaaaataaggctagtccgttatcaacttgaaaaagtggcaccgagtcggtgccctccatggctcagtgaacaaattctgcaatccgcactctgggcagtgtgag

SEQ ID NO: 2982 - RNA, 148 nt, synthetic construct
  source 1..148: mol_type = other RNA; note = pegRNA
tgcactcacactgcccagaggttttagagctagaaatagcaagttaaaataaggctagtccgttatcaacttgaaaaagtggcaccgagtcggtgccctccatggctcagtgaacaaattctgcaatccgcactctgggcagtgtttt

SEQ ID NO: 2983 - RNA, 148 nt, synthetic construct
  source 1..148: mol_type = other RNA; note = pegRNA
tgcactcacactgcccagaggttttagagctagaaatagcaagttaaaataaggctagtccgttatcaacttgaaaaagtggcaccgagtcggtgcctccatggctcagtgaacaaattctgcaatccacactctgggcagtgtgagt

SEQ ID NO: 2984 - RNA, 148 nt, synthetic construct
  source 1..148: mol_type = other RNA; note = pegRNA
tgcactcacactgcccagaggttttagagctagaaatagcaagttaaaataaggctagtccgttatcaacttgaaaaagtggcaccgagtcggtgcctccatggctcagtgaacaaattctgcaatccacactctgggcagtgttttt

SEQ ID NO: 2985 - RNA, 148 nt, synthetic construct
  source 1..148: mol_type = other RNA; note = pegRNA
tgcactcacactgcccagaggttttagagctagaaatagcaagttaaaataaggctagtccgttatcaacttgaaaaagtggcaccgagtcggtgcctccatggctcagtgaacaaattctgcaatccgcactctgggcagtgtgagt

SEQ ID NO: 2986 - RNA, 148 nt, synthetic construct
  source 1..148: mol_type = other RNA; note = pegRNA
tgcactcacactgcccagaggttttagagctagaaatagcaagttaaaataaggctagtccgttatcaacttgaaaaagtggcaccgagtcggtgcctccatggctcagtgaacaaattctgcaatccgcactctgggcagtgttttt

SEQ ID NO: 2987 - RNA, 148 nt, synthetic construct
  source 1..148: mol_type = other RNA; note = pegRNA
tgcactcacactgcccagaggttttagagctagaaatagcaagttaaaataaggctagtccgttatcaacttgaaaaagtggcaccgagtcggtgcggctcagtgaacaaattctgcaatccacactctgggcagtgtgagtgctttt

SEQ ID NO: 2988 - RNA, 148 nt, synthetic construct
  source 1..148: mol_type = other RNA; note = pegRNA
tgcactcacactgcccagaggttttagagctagaaatagcaagttaaaataaggctagtccgttatcaacttgaaaaagtggcaccgagtcggtgcggctcagtgaacaaattctgcaatccgcactctgggcagtgtgagtgctttt

SEQ ID NO: 2989 - RNA, 148 nt, synthetic construct
  source 1..148: mol_type = other RNA; note = pegRNA
tgcactcacactgcccagaggttttagagctagaaatagcaagttaaaataaggctagtccgttatcaacttgaaaaagtggcaccgagtcggtgctccatggctcagtgaacaaattctgcaatccacactctgggcagtgtgagtg

SEQ ID NO: 2990 - RNA, 148 nt, synthetic construct
  source 1..148: mol_type = other RNA; note = pegRNA
tgcactcacactgcccagaggttttagagctagaaatagcaagttaaaataaggctagtccgttatcaacttgaaaaagtggcaccgagtcggtgctccatggctcagtgaacaaattctgcaatccacactctgggcagtgtgtttt

SEQ ID NO: 2991 - RNA, 148 nt, synthetic construct
  source 1..148: mol_type = other RNA; note = pegRNA
tgcactcacactgcccagaggttttagagctagaaatagcaagttaaaataaggctagtccgttatcaacttgaaaaagtggcaccgagtcggtgctccatggctcagtgaacaaattctgcaatccgcactctgggcagtgtgagtg

SEQ ID NO: 2992 - RNA, 148 nt, synthetic construct
  source 1..148: mol_type = other RNA; note = pegRNA
tgcactcacactgcccagaggttttagagctagaaatagcaagttaaaataaggctagtccgttatcaacttgaaaaagtggcaccgagtcggtgctccatggctcagtgaacaaattctgcaatccgcactctgggcagtgtgtttt

SEQ ID NO: 2993 - RNA, 148 nt, synthetic construct
  source 1..148: mol_type = other RNA; note = pegRNA
tgcactcacactgcccagaggttttagagctagaaatagcaagttaaaataaggctagtccgttatcaacttgaaaaagtggcaccgagtcggtgctggctcagtgaacaaattctgcaatccacactctgggcagtgtgagtgtttt

SEQ ID NO: 2994 - RNA, 148 nt, synthetic construct
  source 1..148: mol_type = other RNA; note = pegRNA
tgcactcacactgcccagaggttttagagctagaaatagcaagttaaaataaggctagtccgttatcaacttgaaaaagtggcaccgagtcggtgctggctcagtgaacaaattctgcaatccgcactctgggcagtgtgagtgtttt

SEQ ID NO: 2995 - RNA, 149 nt, synthetic construct
  source 1..149: mol_type = other RNA; note = pegRNA
tgcactcacactgcccagaggttttagagctagaaatagcaagttaaaataaggctagtccgttatcaacttgaaaaagtggcaccgagtcggtgcacctccatggctcagtgaacaaattctgcaatccacactctgggcagtgtgag

SEQ ID NO: 2996 - RNA, 149 nt, synthetic construct
  source 1..149: mol_type = other RNA; note = pegRNA
tgcactcacactgcccagaggttttagagctagaaatagcaagttaaaataaggctagtccgttatcaacttgaaaaagtggcaccgagtcggtgcacctccatggctcagtgaacaaattctgcaatccacactctgggcagtgtttt

SEQ ID NO: 2997 - RNA, 149 nt, synthetic construct
  source 1..149: mol_type = other RNA; note = pegRNA
tgcactcacactgcccagaggttttagagctagaaatagcaagttaaaataaggctagtccgttatcaacttgaaaaagtggcaccgagtcggtgcacctccatggctcagtgaacaaattctgcaatccgcactctgggcagtgtgag

SEQ ID NO: 2998 - RNA, 149 nt, synthetic construct
  source 1..149: mol_type = other RNA; note = pegRNA
tgcactcacactgcccagaggttttagagctagaaatagcaagttaaaataaggctagtccgttatcaacttgaaaaagtggcaccgagtcggtgcacctccatggctcagtgaacaaattctgcaatccgcactctgggcagtgtttt

SEQ ID NO: 2999 - RNA, 149 nt, synthetic construct
  source 1..149: mol_type = other RNA; note = pegRNA
tgcactcacactgcccagaggttttagagctagaaatagcaagttaaaataaggctagtccgttatcaacttgaaaaagtggcaccgagtcggtgcatggctcagtgaacaaattctgcaatccacactctgggcagtgtgagtgtttt

SEQ ID NO: 3000 - RNA, 149 nt, synthetic construct
  source 1..149: mol_type = other RNA; note = pegRNA
tgcactcacactgcccagaggttttagagctagaaatagcaagttaaaataaggctagtccgttatcaacttgaaaaagtggcaccgagtcggtgcatggctcagtgaacaaattctgcaatccgcactctgggcagtgtgagtgtttt

SEQ ID NO: 3001 - RNA, 149 nt, synthetic construct
  source 1..149: mol_type = other RNA; note = pegRNA
tgcactcacactgcccagaggttttagagctagaaatagcaagttaaaataaggctagtccgttatcaacttgaaaaagtggcaccgagtcggtgccatggctcagtgaacaaattctgcaatccacactctgggcagtgtgagttttt

SEQ ID NO: 3002 - RNA, 149 nt, synthetic construct
  source 1..149: mol_type = other RNA; note = pegRNA
tgcactcacactgcccagaggttttagagctagaaatagcaagttaaaataaggctagtccgttatcaacttgaaaaagtggcaccgagtcggtgccatggctcagtgaacaaattctgcaatccgcactctgggcagtgtgagttttt

SEQ ID NO: 3003 - RNA, 149 nt, synthetic construct
  source 1..149: mol_type = other RNA; note = pegRNA
tgcactcacactgcccagaggttttagagctagaaatagcaagttaaaataaggctagtccgttatcaacttgaaaaagtggcaccgagtcggtgcccatggctcagtgaacaaattctgcaatccacactctgggcagtgtgagtttt

SEQ ID NO: 3004 - RNA, 149 nt, synthetic construct
  source 1..149: mol_type = other RNA; note = pegRNA
tgcactcacactgcccagaggttttagagctagaaatagcaagttaaaataaggctagtccgttatcaacttgaaaaagtggcaccgagtcggtgcccatggctcagtgaacaaattctgcaatccgcactctgggcagtgtgagtttt

SEQ ID NO: 3005 - RNA, 149 nt, synthetic construct
  source 1..149: mol_type = other RNA; note = pegRNA
tgcactcacactgcccagaggttttagagctagaaatagcaagttaaaataaggctagtccgttatcaacttgaaaaagtggcaccgagtcggtgccctccatggctcagtgaacaaattctgcaatccacactctgggcagtgtgagt

SEQ ID NO: 3006 - RNA, 149 nt, synthetic construct
  source 1..149: mol_type = other RNA; note = pegRNA
tgcactcacactgcccagaggttttagagctagaaatagcaagttaaaataaggctagtccgttatcaacttgaaaaagtggcaccgagtcggtgccctccatggctcagtgaacaaattctgcaatccacactctgggcagtgttttt

SEQ ID NO: 3007 - RNA, 149 nt, synthetic construct
  source 1..149: mol_type = other RNA; note = pegRNA
tgcactcacactgcccagaggttttagagctagaaatagcaagttaaaataaggctagtccgttatcaacttgaaaaagtggcaccgagtcggtgccctccatggctcagtgaacaaattctgcaatccgcactctgggcagtgtgagt

SEQ ID NO: 3008 - RNA, 149 nt, synthetic construct
  source 1..149: mol_type = other RNA; note = pegRNA
tgcactcacactgcccagaggttttagagctagaaatagcaagttaaaataaggctagtccgttatcaacttgaaaaagtggcaccgagtcggtgccctccatggctcagtgaacaaattctgcaatccgcactctgggcagtgttttt

SEQ ID NO: 3009 - RNA, 149 nt, synthetic construct
  source 1..149: mol_type = other RNA; note = pegRNA
tgcactcacactgcccagaggttttagagctagaaatagcaagttaaaataaggctagtccgttatcaacttgaaaaagtggcaccgagtcggtgcctccatggctcagtgaacaaattctgcaatccacactctgggcagtgtgagtg

SEQ ID NO: 3010 - RNA, 149 nt, synthetic construct
  source 1..149: mol_type = other RNA; note = pegRNA
tgcactcacactgcccagaggttttagagctagaaatagcaagttaaaataaggctagtccgttatcaacttgaaaaagtggcaccgagtcggtgcctccatggctcagtgaacaaattctgcaatccacactctgggcagtgtgtttt

SEQ ID NO: 3011 - RNA, 149 nt, synthetic construct
  source 1..149: mol_type = other RNA; note = pegRNA
tgcactcacactgcccagaggttttagagctagaaatagcaagttaaaataaggctagtccgttatcaacttgaaaaagtggcaccgagtcggtgcctccatggctcagtgaacaaattctgcaatccgcactctgggcagtgtgagtg

SEQ ID NO: 3012 - RNA, 149 nt, synthetic construct
  source 1..149: mol_type = other RNA; note = pegRNA
tgcactcacactgcccagaggttttagagctagaaatagcaagttaaaataaggctagtccgttatcaacttgaaaaagtggcaccgagtcggtgcctccatggctcagtgaacaaattctgcaatccgcactctgggcagtgtgtttt

SEQ ID NO: 3013 - RNA, 149 nt, synthetic construct
  source 1..149: mol_type = other RNA; note = pegRNA
tgcactcacactgcccagaggttttagagctagaaatagcaagttaaaataaggctagtccgttatcaacttgaaaaagtggcaccgagtcggtgctccatggctcagtgaacaaattctgcaatccacactctgggcagtgtgagtgc

SEQ ID NO: 3014 - RNA, 149 nt, synthetic construct
  source 1..149: mol_type = other RNA; note = pegRNA
tgcactcacactgcccagaggttttagagctagaaatagcaagttaaaataaggctagtccgttatcaacttgaaaaagtggcaccgagtcggtgctccatggctcagtgaacaaattctgcaatccacactctgggcagtgtgatttt

SEQ ID NO: 3015 - RNA, 149 nt, synthetic construct
  source 1..149: mol_type = other RNA; note = pegRNA
tgcactcacactgcccagaggttttagagctagaaatagcaagttaaaataaggctagtccgttatcaacttgaaaaagtggcaccgagtcggtgctccatggctcagtgaacaaattctgcaatccgcactctgggcagtgtgagtgc

SEQ ID NO: 3016 - RNA, 149 nt, synthetic construct
  source 1..149: mol_type = other RNA; note = pegRNA
tgcactcacactgcccagaggttttagagctagaaatagcaagttaaaataaggctagtccgttatcaacttgaaaaagtggcaccgagtcggtgctccatggctcagtgaacaaattctgcaatccgcactctgggcagtgtgatttt

SEQ ID NO: 3017 - RNA, 149 nt, synthetic construct
  source 1..149: mol_type = other RNA; note = pegRNA
tgcactcacactgcccagaggttttagagctagaaatagcaagttaaaataaggctagtccgttatcaacttgaaaaagtggcaccgagtcggtgctggctcagtgaacaaattctgcaatccacactctgggcagtgtgagtgctttt

SEQ ID NO: 3018 - RNA, 149 nt, synthetic construct
  source 1..149: mol_type = other RNA; note = pegRNA
tgcactcacactgcccagaggttttagagctagaaatagcaagttaaaataaggctagtccgttatcaacttgaaaaagtggcaccgagtcggtgctggctcagtgaacaaattctgcaatccgcactctgggcagtgtgagtgctttt

SEQ ID NO: 3019 - RNA, 150 nt, synthetic construct
  source 1..150: mol_type = other RNA; note = pegRNA
tgcactcacactgcccagaggttttagagctagaaatagcaagttaaaataaggctagtccgttatcaacttgaaaaagtggcaccgagtcggtgcacctccatggctcagtgaacaaattctgcaatccacactctgggcagtgtgagt

SEQ ID NO: 3020 - RNA, 150 nt, synthetic construct
  source 1..150: mol_type = other RNA; note = pegRNA
tgcactcacactgcccagaggttttagagctagaaatagcaagttaaaataaggctagtccgttatcaacttgaaaaagtggcaccgagtcggtgcacctccatggctcagtgaacaaattctgcaatccacactctgggcagtgttttt

SEQ ID NO: 3021 - RNA, 150 nt, synthetic construct
  source 1..150: mol_type = other RNA; note = pegRNA
tgcactcacactgcccagaggttttagagctagaaatagcaagttaaaataaggctagtccgttatcaacttgaaaaagtggcaccgagtcggtgcacctccatggctcagtgaacaaattctgcaatccgcactctgggcagtgtgagt

SEQ ID NO: 3022 - RNA, 150 nt, synthetic construct
  source 1..150: mol_type = other RNA; note = pegRNA
tgcactcacactgcccagaggttttagagctagaaatagcaagttaaaataaggctagtccgttatcaacttgaaaaagtggcaccgagtcggtgcacctccatggctcagtgaacaaattctgcaatccgcactctgggcagtgttttt

SEQ ID NO: 3023 - RNA, 150 nt, synthetic construct
  source 1..150: mol_type = other RNA; note = pegRNA
tgcactcacactgcccagaggttttagagctagaaatagcaagttaaaataaggctagtccgttatcaacttgaaaaagtggcaccgagtcggtgcatggctcagtgaacaaattctgcaatccacactctgggcagtgtgagtgctttt

SEQ ID NO: 3024 - RNA, 150 nt, synthetic construct
  source 1..150: mol_type = other RNA; note = pegRNA
tgcactcacactgcccagaggttttagagctagaaatagcaagttaaaataaggctagtccgttatcaacttgaaaaagtggcaccgagtcggtgcatggctcagtgaacaaattctgcaatccgcactctgggcagtgtgagtgctttt

SEQ ID NO: 3025 - RNA, 150 nt, synthetic construct
  source 1..150: mol_type = other RNA; note = pegRNA
tgcactcacactgcccagaggttttagagctagaaatagcaagttaaaataaggctagtccgttatcaacttgaaaaagtggcaccgagtcggtgccatggctcagtgaacaaattctgcaatccacactctgggcagtgtgagtgtttt

SEQ ID NO: 3026 - RNA, 150 nt, synthetic construct
  source 1..150: mol_type = other RNA; note = pegRNA
tgcactcacactgcccagaggttttagagctagaaatagcaagttaaaataaggctagtccgttatcaacttgaaaaagtggcaccgagtcggtgccatggctcagtgaacaaattctgcaatccgcactctgggcagtgtgagtgtttt

SEQ ID NO: 3027 - RNA, 150 nt, synthetic construct
  source 1..150: mol_type = other RNA; note = pegRNA
tgcactcacactgcccagaggttttagagctagaaatagcaagttaaaataaggctagtccgttatcaacttgaaaaagtggcaccgagtcggtgcccatggctcagtgaacaaattctgcaatccacactctgggcagtgtgagttttt

SEQ ID NO: 3028 - RNA, 150 nt, synthetic construct
  source 1..150: mol_type = other RNA; note = pegRNA
tgcactcacactgcccagaggttttagagctagaaatagcaagttaaaataaggctagtccgttatcaacttgaaaaagtggcaccgagtcggtgcccatggctcagtgaacaaattctgcaatccgcactctgggcagtgtgagttttt

SEQ ID NO: 3029 - RNA, 150 nt, synthetic construct
  source 1..150: mol_type = other RNA; note = pegRNA
tgcactcacactgcccagaggttttagagctagaaatagcaagttaaaataaggctagtccgttatcaacttgaaaaagtggcaccgagtcggtgccctccatggctcagtgaacaaattctgcaatccacactctgggcagtgtgagtg

SEQ ID NO: 3030 - RNA, 150 nt, synthetic construct
  source 1..150: mol_type = other RNA; note = pegRNA
tgcactcacactgcccagaggttttagagctagaaatagcaagttaaaataaggctagtccgttatcaacttgaaaaagtggcaccgagtcggtgccctccatggctcagtgaacaaattctgcaatccacactctgggcagtgtgtttt

SEQ ID NO: 3031 - RNA, 150 nt, synthetic construct
  source 1..150: mol_type = other RNA; note = pegRNA
tgcactcacactgcccagaggttttagagctagaaatagcaagttaaaataaggctagtccgttatcaacttgaaaaagtggcaccgagtcggtgccctccatggctcagtgaacaaattctgcaatccgcactctgggcagtgtgagtg

SEQ ID NO: 3032 - RNA, 150 nt, synthetic construct
  source 1..150: mol_type = other RNA; note = pegRNA
tgcactcacactgcccagaggttttagagctagaaatagcaagttaaaataaggctagtccgttatcaacttgaaaaagtggcaccgagtcggtgccctccatggctcagtgaacaaattctgcaatccgcactctgggcagtgtgtttt

SEQ ID NO: 3033 - RNA, 150 nt, synthetic construct
  source 1..150: mol_type = other RNA; note = pegRNA
tgcactcacactgcccagaggttttagagctagaaatagcaagttaaaataaggctagtccgttatcaacttgaaaaagtggcaccgagtcggtgcctccatggctcagtgaacaaattctgcaatccacactctgggcagtgtgagtgc

SEQ ID NO: 3034 - RNA, 150 nt, synthetic construct
  source 1..150: mol_type = other RNA; note = pegRNA
tgcactcacactgcccagaggttttagagctagaaatagcaagttaaaataaggctagtccgttatcaacttgaaaaagtggcaccgagtcggtgcctccatggctcagtgaacaaattctgcaatccacactctgggcagtgtgatttt

SEQ ID NO: 3035 - RNA, 150 nt, synthetic construct
  source 1..150: mol_type = other RNA; note = pegRNA
tgcactcacactgcccagaggttttagagctagaaatagcaagttaaaataaggctagtccgttatcaacttgaaaaagtggcaccgagtcggtgcctccatggctcagtgaacaaattctgcaatccgcactctgggcagtgtgagtgc

SEQ ID NO: 3036 - RNA, 150 nt, synthetic construct
  source 1..150: mol_type = other RNA; note = pegRNA
tgcactcacactgcccagaggttttagagctagaaatagcaagttaaaataaggctagtccgttatcaacttgaaaaagtggcaccgagtcggtgcctccatggctcagtgaacaaattctgcaatccgcactctgggcagtgtgatttt

SEQ ID NO: 3037 - RNA, 150 nt, synthetic construct
  source 1..150: mol_type = other RNA; note = pegRNA
tgcactcacactgcccagaggttttagagctagaaatagcaagttaaaataaggctagtccgttatcaacttgaaaaagtggcaccgagtcggtgctccatggctcagtgaacaaattctgcaatccacactctgggcagtgtgagtttt

SEQ ID NO: 3038 - RNA, 150 nt, synthetic construct
  source 1..150: mol_type = other RNA; note = pegRNA
tgcactcacactgcccagaggttttagagctagaaatagcaagttaaaataaggctagtccgttatcaacttgaaaaagtggcaccgagtcggtgctccatggctcagtgaacaaattctgcaatccgcactctgggcagtgtgagtttt

SEQ ID NO: 3039 - RNA, 151 nt, synthetic construct
  source 1..151: mol_type = other RNA; note = pegRNA
tgcactcacactgcccagaggttttagagctagaaatagcaagttaaaataaggctagtccgttatcaacttgaaaaagtggcaccgagtcggtgcacctccatggctcagtgaacaaattctgcaatccacactctgggcagtgtgagtg

SEQ ID NO: 3040 - RNA, 151 nt, synthetic construct
  source 1..151: mol_type = other RNA; note = pegRNA
tgcactcacactgcccagaggttttagagctagaaatagcaagttaaaataaggctagtccgttatcaacttgaaaaagtggcaccgagtcggtgcacctccatggctcagtgaacaaattctgcaatccacactctgggcagtgtgtttt

SEQ ID NO: 3041 - RNA, 151 nt, synthetic construct
  source 1..151: mol_type = other RNA; note = pegRNA
tgcactcacactgcccagaggttttagagctagaaatagcaagttaaaataaggctagtccgttatcaacttgaaaaagtggcaccgagtcggtgcacctccatggctcagtgaacaaattctgcaatccgcactctgggcagtgtgagtg

SEQ ID NO: 3042 - RNA, 151 nt, synthetic construct
  source 1..151: mol_type = other RNA; note = pegRNA
tgcactcacactgcccagaggttttagagctagaaatagcaagttaaaataaggctagtccgttatcaacttgaaaaagtggcaccgagtcggtgcacctccatggctcagtgaacaaattctgcaatccgcactctgggcagtgtgtttt

SEQ ID NO: 3043 - RNA, 151 nt, synthetic construct
  source 1..151: mol_type = other RNA; note = pegRNA
tgcactcacactgcccagaggttttagagctagaaatagcaagttaaaataaggctagtccgttatcaacttgaaaaagtggcaccgagtcggtgccatggctcagtgaacaaattctgcaatccacactctgggcagtgtgagtgctttt

SEQ ID NO: 3044 - RNA, 151 nt, synthetic construct
  source 1..151: mol_type = other RNA; note = pegRNA
tgcactcacactgcccagaggttttagagctagaaatagcaagttaaaataaggctagtccgttatcaacttgaaaaagtggcaccgagtcggtgccatggctcagtgaacaaattctgcaatccgcactctgggcagtgtgagtgctttt

SEQ ID NO: 3045 - RNA, 151 nt, synthetic construct
  source 1..151: mol_type = other RNA; note = pegRNA
tgcactcacactgcccagaggttttagagctagaaatagcaagttaaaataaggctagtccgttatcaacttgaaaaagtggcaccgagtcggtgcccatggctcagtgaacaaattctgcaatccacactctgggcagtgtgagtgtttt

SEQ ID NO: 3046 - RNA, 151 nt, synthetic construct
  source 1..151: mol_type = other RNA; note = pegRNA
tgcactcacactgcccagaggttttagagctagaaatagcaagttaaaataaggctagtccgttatcaacttgaaaaagtggcaccgagtcggtgcccatggctcagtgaacaaattctgcaatccgcactctgggcagtgtgagtgtttt

SEQ ID NO: 3047 - RNA, 151 nt, synthetic construct
  source 1..151: mol_type = other RNA; note = pegRNA
tgcactcacactgcccagaggttttagagctagaaatagcaagttaaaataaggctagtccgttatcaacttgaaaaagtggcaccgagtcggtgccctccatggctcagtgaacaaattctgcaatccacactctgggcagtgtgagtgc

SEQ ID NO: 3048 - RNA, 151 nt, synthetic construct
  source 1..151: mol_type = other RNA; note = pegRNA
tgcactcacactgcccagaggttttagagctagaaatagcaagttaaaataaggctagtccgttatcaacttgaaaaagtggcaccgagtcggtgccctccatggctcagtgaacaaattctgcaatccacactctgggcagtgtgatttt

SEQ ID NO: 3049 - RNA, 151 nt, synthetic construct
  source 1..151: mol_type = other RNA; note = pegRNA
tgcactcacactgcccagaggttttagagctagaaatagcaagttaaaataaggctagtccgttatcaacttgaaaaagtggcaccgagtcggtgccctccatggctcagtgaacaaattctgcaatccgcactctgggcagtgtgagtgc

SEQ ID NO: 3050 - RNA, 151 nt, synthetic construct
  source 1..151: mol_type = other RNA; note = pegRNA
tgcactcacactgcccagaggttttagagctagaaatagcaagttaaaataaggctagtccgttatcaacttgaaaaagtggcaccgagtcggtgccctccatggctcagtgaacaaattctgcaatccgcactctgggcagtgtgatttt

SEQ ID NO: 3051 - RNA, 151 nt, synthetic construct
  source 1..151: mol_type = other RNA; note = pegRNA
tgcactcacactgcccagaggttttagagctagaaatagcaagttaaaataaggctagtccgttatcaacttgaaaaagtggcaccgagtcggtgcctccatggctcagtgaacaaattctgcaatccacactctgggcagtgtgagtttt

SEQ ID NO: 3052 - RNA, 151 nt, synthetic construct
  source 1..151: mol_type = other RNA; note = pegRNA
tgcactcacactgcccagaggttttagagctagaaatagcaagttaaaataaggctagtccgttatcaacttgaaaaagtggcaccgagtcggtgcctccatggctcagtgaacaaattctgcaatccgcactctgggcagtgtgagtttt

SEQ ID NO: 3053 - RNA, 151 nt, synthetic construct
  source 1..151: mol_type = other RNA; note = pegRNA
tgcactcacactgcccagaggttttagagctagaaatagcaagttaaaataaggctagtccgttatcaacttgaaaaagtggcaccgagtcggtgctccatggctcagtgaacaaattctgcaatccacactctgggcagtgtgagttttt

SEQ ID NO: 3054 - RNA, 151 nt, synthetic construct
  source 1..151: mol_type = other RNA; note = pegRNA
tgcactcacactgcccagaggttttagagctagaaatagcaagttaaaataaggctagtccgttatcaacttgaaaaagtggcaccgagtcggtgctccatggctcagtgaacaaattctgcaatccgcactctgggcagtgtgagttttt

SEQ ID NO: 3055 - RNA, 152 nt, synthetic construct
  source 1..152: mol_type = other RNA; note = pegRNA
tgcactcacactgcccagaggttttagagctagaaatagcaagttaaaataaggctagtccgttatcaacttgaaaaagtggcaccgagtcggtgcacctccatggctcagtgaacaaattctgcaatccacactctgggcagtgtgagtgc

SEQ ID NO: 3056 - RNA, 152 nt, synthetic construct
  source 1..152: mol_type = other RNA; note = pegRNA
tgcactcacactgcccagaggttttagagctagaaatagcaagttaaaataaggctagtccgttatcaacttgaaaaagtggcaccgagtcggtgcacctccatggctcagtgaacaaattctgcaatccacactctgggcagtgtgatttt

SEQ ID NO: 3057 - RNA, 152 nt, synthetic construct
  source 1..152: mol_type = other RNA; note = pegRNA
tgcactcacactgcccagaggttttagagctagaaatagcaagttaaaataaggctagtccgttatcaacttgaaaaagtggcaccgagtcggtgcacctccatggctcagtgaacaaattctgcaatccgcactctgggcagtgtgagtgc

SEQ ID NO: 3058 - RNA, 152 nt, synthetic construct
  source 1..152: mol_type = other RNA; note = pegRNA
tgcactcacactgcccagaggttttagagctagaaatagcaagttaaaataaggctagtccgttatcaacttgaaaaagtggcaccgagtcggtgcacctccatggctcagtgaacaaattctgcaatccgcactctgggcagtgtgatttt

SEQ ID NO: 3059 - RNA, 152 nt, synthetic construct
  source 1..152: mol_type = other RNA; note = pegRNA
tgcactcacactgcccagaggttttagagctagaaatagcaagttaaaataaggctagtccgttatcaacttgaaaaagtggcaccgagtcggtgcccatggctcagtgaacaaattctgcaatccacactctgggcagtgtgagtgctttt

SEQ ID NO: 3060 - RNA, 152 nt, synthetic construct
  source 1..152: mol_type = other RNA; note = pegRNA
tgcactcacactgcccagaggttttagagctagaaatagcaagttaaaataaggctagtccgttatcaacttgaaaaagtggcaccgagtcggtgcccatggctcagtgaacaaattctgcaatccgcactctgggcagtgtgagtgctttt

SEQ ID NO: 3061 - RNA, 152 nt, synthetic construct
  source 1..152: mol_type = other RNA; note = pegRNA
tgcactcacactgcccagaggttttagagctagaaatagcaagttaaaataaggctagtccgttatcaacttgaaaaagtggcaccgagtcggtgccctccatggctcagtgaacaaattctgcaatccacactctgggcagtgtgagtttt

SEQ ID NO: 3062 - RNA, 152 nt, synthetic construct
  source 1..152: mol_type = other RNA; note = pegRNA
tgcactcacactgcccagaggttttagagctagaaatagcaagttaaaataaggctagtccgttatcaacttgaaaaagtggcaccgagtcggtgccctccatggctcagtgaacaaattctgcaatccgcactctgggcagtgtgagtttt

SEQ ID NO: 3063 - RNA, 152 nt, synthetic construct
  source 1..152: mol_type = other RNA; note = pegRNA
tgcactcacactgcccagaggttttagagctagaaatagcaagttaaaataaggctagtccgttatcaacttgaaaaagtggcaccgagtcggtgcctccatggctcagtgaacaaattctgcaatccacactctgggcagtgtgagttttt

SEQ ID NO: 3064 - RNA, 152 nt, synthetic construct
  source 1..152: mol_type = other RNA; note = pegRNA
tgcactcacactgcccagaggttttagagctagaaatagcaagttaaaataaggctagtccgttatcaacttgaaaaagtggcaccgagtcggtgcctccatggctcagtgaacaaattctgcaatccgcactctgggcagtgtgagttttt

SEQ ID NO: 3065 - RNA, 152 nt, synthetic construct
  source 1..152: mol_type = other RNA; note = pegRNA
tgcactcacactgcccagaggttttagagctagaaatagcaagttaaaataaggctagtccgttatcaacttgaaaaagtggcaccgagtcggtgctccatggctcagtgaacaaattctgcaatccacactctgggcagtgtgagtgtttt

SEQ ID NO: 3066 - RNA, 152 nt, synthetic construct
  source 1..152: mol_type = other RNA; note = pegRNA
tgcactcacactgcccagaggttttagagctagaaatagcaagttaaaataaggctagtccgttatcaacttgaaaaagtggcaccgagtcggtgctccatggctcagtgaacaaattctgcaatccgcactctgggcagtgtgagtgtttt

SEQ ID NO: 3067 - RNA, 153 nt, synthetic construct
  source 1..153: mol_type = other RNA; note = pegRNA
tgcactcacactgcccagaggttttagagctagaaatagcaagttaaaataaggctagtccgttatcaacttgaaaaagtggcaccgagtcggtgcacctccatggctcagtgaacaaattctgcaatccacactctgggcagtgtgagtttt

SEQ ID NO: 3068 - RNA, 153 nt, synthetic construct
  source 1..153: mol_type = other RNA; note = pegRNA
tgcactcacactgcccagaggttttagagctagaaatagcaagttaaaataaggctagtccgttatcaacttgaaaaagtggcaccgagtcggtgcacctccatggctcagtgaacaaattctgcaatccgcactctgggcagtgtgagtttt

SEQ ID NO: 3069 - RNA, 153 nt, synthetic construct
  source 1..153: mol_type = other RNA; note = pegRNA
tgcactcacactgcccagaggttttagagctagaaatagcaagttaaaataaggctagtccgttatcaacttgaaaaagtggcaccgagtcggtgccctccatggctcagtgaacaaattctgcaatccacactctgggcagtgtgagttttt

SEQ ID NO: 3070 - RNA, 153 nt, synthetic construct
  source 1..153: mol_type = other RNA; note = pegRNA
tgcactcacactgcccagaggttttagagctagaaatagcaagttaaaataaggctagtccgttatcaacttgaaaaagtggcaccgagtcggtgccctccatggctcagtgaacaaattctgcaatccgcactctgggcagtgtgagttttt

SEQ ID NO: 3071 - RNA, 153 nt, synthetic construct
  source 1..153: mol_type = other RNA; note = pegRNA
tgcactcacactgcccagaggttttagagctagaaatagcaagttaaaataaggctagtccgttatcaacttgaaaaagtggcaccgagtcggtgcctccatggctcagtgaacaaattctgcaatccacactctgggcagtgtgagtgtttt

SEQ ID NO: 3072 - RNA, 153 nt, synthetic construct
  source 1..153: mol_type = other RNA; note = pegRNA
tgcactcacactgcccagaggttttagagctagaaatagcaagttaaaataaggctagtccgttatcaacttgaaaaagtggcaccgagtcggtgcctccatggctcagtgaacaaattctgcaatccgcactctgggcagtgtgagtgtttt

SEQ ID NO: 3073 - RNA, 153 nt, synthetic construct
  source 1..153: mol_type = other RNA; note = pegRNA
tgcactcacactgcccagaggttttagagctagaaatagcaagttaaaataaggctagtccgttatcaacttgaaaaagtggcaccgagtcggtgctccatggctcagtgaacaaattctgcaatccacactctgggcagtgtgagtgctttt

SEQ ID NO: 3074 - RNA, 153 nt, synthetic construct
  source 1..153: mol_type = other RNA; note = pegRNA
tgcactcacactgcccagaggttttagagctagaaatagcaagttaaaataaggctagtccgttatcaacttgaaaaagtggcaccgagtcggtgctccatggctcagtgaacaaattctgcaatccgcactctgggcagtgtgagtgctttt

SEQ ID NO: 3075 - RNA, 154 nt, synthetic construct
  source 1..154: mol_type = other RNA; note = pegRNA
tgcactcacactgcccagaggttttagagctagaaatagcaagttaaaataaggctagtccgttatcaacttgaaaaagtggcaccgagtcggtgcacctccatggctcagtgaacaaattctgcaatccacactctgggcagtgtgagttttt

SEQ ID NO: 3076 - RNA, 154 nt, synthetic construct
  source 1..154: mol_type = other RNA; note = pegRNA
tgcactcacactgcccagaggttttagagctagaaatagcaagttaaaataaggctagtccgttatcaacttgaaaaagtggcaccgagtcggtgcacctccatggctcagtgaacaaattctgcaatccgcactctgggcagtgtgagttttt

SEQ ID NO: 3077 - RNA, 154 nt, synthetic construct
  source 1..154: mol_type = other RNA; note = pegRNA
tgcactcacactgcccagaggttttagagctagaaatagcaagttaaaataaggctagtccgttatcaacttgaaaaagtggcaccgagtcggtgccctccatggctcagtgaacaaattctgcaatccacactctgggcagtgtgagtgtttt

SEQ ID NO: 3078 - RNA, 154 nt, synthetic construct
  source 1..154: mol_type = other RNA; note = pegRNA
tgcactcacactgcccagaggttttagagctagaaatagcaagttaaaataaggctagtccgttatcaacttgaaaaagtggcaccgagtcggtgccctccatggctcagtgaacaaattctgcaatccgcactctgggcagtgtgagtgtttt

SEQ ID NO: 3079 - RNA, 154 nt, synthetic construct
  source 1..154: mol_type = other RNA; note = pegRNA
tgcactcacactgcccagaggttttagagctagaaatagcaagttaaaataaggctagtccgttatcaacttgaaaaagtggcaccgagtcggtgcctccatggctcagtgaacaaattctgcaatccacactctgggcagtgtgagtgctttt

SEQ ID NO: 3080 - RNA, 154 nt, synthetic construct
  source 1..154: mol_type = other RNA; note = pegRNA
tgcactcacactgcccagaggttttagagctagaaatagcaagttaaaataaggctagtccgttatcaacttgaaaaagtggcaccgagtcggtgcctccatggctcagtgaacaaattctgcaatccgcactctgggcagtgtgagtgctttt

SEQ ID NO: 3081 - RNA, 155 nt, synthetic construct
  source 1..155: mol_type = other RNA; note = pegRNA
tgcactcacactgcccagaggttttagagctagaaatagcaagttaaaataaggctagtccgttatcaacttgaaaaagtggcaccgagtcggtgcacctccatggctcagtgaacaaattctgcaatccacactctgggcagtgtgagtgtttt

SEQ ID NO: 3082 - RNA, 155 nt, synthetic construct
  source 1..155: mol_type = other RNA; note = pegRNA
tgcactcacactgcccagaggttttagagctagaaatagcaagttaaaataaggctagtccgttatcaacttgaaaaagtggcaccgagtcggtgcacctccatggctcagtgaacaaattctgcaatccgcactctgggcagtgtgagtgtttt

SEQ ID NO: 3083 - RNA, 155 nt, synthetic construct
  source 1..155: mol_type = other RNA; note = pegRNA
tgcactcacactgcccagaggttttagagctagaaatagcaagttaaaataaggctagtccgttatcaacttgaaaaagtggcaccgagtcggtgccctccatggctcagtgaacaaattctgcaatccacactctgggcagtgtgagtgctttt

SEQ ID NO: 3084 - RNA, 155 nt, synthetic construct
  source 1..155: mol_type = other RNA; note = pegRNA
tgcactcacactgcccagaggttttagagctagaaatagcaagttaaaataaggctagtccgttatcaacttgaaaaagtggcaccgagtcggtgccctccatggctcagtgaacaaattctgcaatccgcactctgggcagtgtgagtgctttt

SEQ ID NO: 3085 - RNA, 156 nt, synthetic construct
  source 1..156: mol_type = other RNA; note = pegRNA
tgcactcacactgcccagaggttttagagctagaaatagcaagttaaaataaggctagtccgttatcaacttgaaaaagtggcaccgagtcggtgcacctccatggctcagtgaacaaattctgcaatccacactctgggcagtgtgagtgctttt

SEQ ID NO: 3086 - RNA, 156 nt, synthetic construct
  source 1..156: mol_type = other RNA; note = pegRNA
tgcactcacactgcccagaggttttagagctagaaatagcaagttaaaataaggctagtccgttatcaacttgaaaaagtggcaccgagtcggtgcacctccatggctcagtgaacaaattctgcaatccgcactctgggcagtgtgagtgctttt

SEQ ID NO: 3087-3091 - skipped (5 entries)

SEQ ID NO: 3092 - RNA, 10 nt, synthetic construct
  source 1..10: mol_type = other RNA; note = PBS
tgacacctgc

SEQ ID NO: 3093 - RNA, 11 nt, synthetic construct
  source 1..11: mol_type = other RNA; note = PBS
tgacacctgca

SEQ ID NO: 3094 - RNA, 12 nt, synthetic construct
  source 1..12: mol_type = other RNA; note = PBS
tgacacctgcag

SEQ ID NO: 3095 - RNA, 13 nt, synthetic construct
  source 1..13: mol_type = other RNA; note = PBS
tgacacctgcaga

SEQ ID NO: 3096 - RNA, 14 nt, synthetic construct
  source 1..14: mol_type = other RNA; note = PBS
tgacacctgcagag

SEQ ID NO: 3097 - RNA, 15 nt, synthetic construct
  source 1..15: mol_type = other RNA; note = PBS
tgacacctgcagaga

SEQ ID NO: 3098 - RNA, 16 nt, synthetic construct
  source 1..16: mol_type = other RNA; note = PBS
tgacacctgcagagaa

SEQ ID NO: 3099 - RNA, 17 nt, synthetic construct
  source 1..17: mol_type = other RNA; note = PBS
tgacacctgcagagaaa

SEQ ID NO: 3100 - RNA, 18 nt, synthetic construct
  source 1..18: mol_type = other RNA; note = PBS
tgacacctgcagagaaaa

SEQ ID NO: 3101 - RNA, 19 nt, synthetic construct
  source 1..19: mol_type = other RNA; note = PBS
tgacacctgcagagaaaac

SEQ ID NO: 3102 - RNA, 17 nt, synthetic construct
  source 1..17: mol_type = other RNA; note = PEgRNA spacer (TG;TGA;TGAAGT PAM)
ctctgcaggtgtcacac

SEQ ID NO: 3103 - RNA, 18 nt, synthetic construct
  source 1..18: mol_type = other RNA; note = PEgRNA spacer (TG;TGA;TGAAGT PAM)
tctctgcaggtgtcacac

SEQ ID NO: 3104 - RNA, 19 nt, synthetic construct
  source 1..19: mol_type = other RNA; note = PEgRNA spacer (TG;TGA;TGAAGT PAM)
ttctctgcaggtgtcacac

SEQ ID NO: 3105 - RNA, 21 nt, synthetic construct
  source 1..21: mol_type = other RNA; note = PEgRNA spacer (TG;TGA;TGAAGT PAM)
ttttctctgcaggtgtcacac

SEQ ID NO: 3106 - RNA, 22 nt, synthetic construct
  source 1..22: mol_type = other RNA; note = PEgRNA spacer (TG;TGA;TGAAGT PAM)
gttttctctgcaggtgtcacac

SEQ ID NO: 3107 - RNA, 33 nt, synthetic construct
  source 1..33: mol_type = other RNA; note = RTT*1,2,3,4,5
tgagtgcaaaaaagaagccaaaggacttcagtg

SEQ ID NO: 3108 - RNA, 34 nt, synthetic construct
  source 1..34: mol_type = other RNA; note = RTT*1,2,3,4,5
gtgagtgcaaaaaagaagccaaaggacttcagtg

SEQ ID NO: 3109 - RNA, 35 nt, synthetic construct
  source 1..35: mol_type = other RNA; note = RTT*1,2,3,4,5
tgtgagtgcaaaaaagaagccaaaggacttcagtg

SEQ ID NO: 3110 - RNA, 36 nt, synthetic construct
  source 1..36: mol_type = other RNA; note = RTT*4 (TGA-to-TGT PAM silencing edit)
gtgtgagtgcaaaaaagaagccaaaggactacagtg

SEQ ID NO: 3111 - RNA, 36 nt, synthetic construct
  source 1..36: mol_type = other RNA; note = RTT*4 (TGA-to-TGG PAM silencing edit)
gtgtgagtgcaaaaaagaagccaaaggactccagtg

SEQ ID NO: 3112 - RNA, 36 nt, synthetic construct
  source 1..36: mol_type = other RNA; note = RTT*4 (TGA-to-TGC PAM silencing edit)
gtgtgagtgcaaaaaagaagccaaaggactgcagtg

SEQ ID NO: 3113 - RNA, 36 nt, synthetic construct
  source 1..36: mol_type = other RNA; note = RTT*1,2,3,4,5
gtgtgagtgcaaaaaagaagccaaaggacttcagtg

SEQ ID NO: 3114 - RNA, 36 nt, synthetic construct
  source 1..36: mol_type = other RNA; note = RTT*4 (TGA-to-TGT PAM silencing edit)
gtgtgagtgcaaaaaagaagccaaaggattacagtg

SEQ ID NO: 3115 - RNA, 36 nt, synthetic construct
  source 1..36: mol_type = other RNA; note = RTT*4 (TGA-to-TGC PAM silencing edit)
gtgtgagtgcaaaaaagaagccaaaggattgcagtg

SEQ ID NO: 3116 - RNA, 36 nt, synthetic construct
  source 1..36: mol_type = other RNA; note = RTT (TGAAGT-to-TGAAGG PAM silencing edit)
gtgtgagtgcaaaaaagaagccaaaggccttcagtg

SEQ ID NO: 3117 - RNA, 36 nt, synthetic construct
  source 1..36: mol_type = other RNA; note = RTT (TGAAGT-to-TGAAGC PAM silencing edit)
gtgtgagtgcaaaaaagaagccaaagggcttcagtg

SEQ ID NO: 3118 - RNA, 36 nt, synthetic construct
  source 1..36: mol_type = other RNA; note = RTT (TGAAGT-to-TGAAGA PAM silencing edit)
gtgtgagtgcaaaaaagaagccaaaggtcttcagtg

SEQ ID NO: 3119 - RNA, 37 nt, synthetic construct
  source 1..37: mol_type = other RNA; note = RTT*4 (TGA-to-TGT PAM silencing edit)
agtgtgagtgcaaaaaagaagccaaaggactacagtg

SEQ ID NO: 3120 - RNA, 37 nt, synthetic construct
  source 1..37: mol_type = other RNA; note = RTT*4 (TGA-to-TGG PAM silencing edit)
agtgtgagtgcaaaaaagaagccaaaggactccagtg

SEQ ID NO: 3121 - RNA, 37 nt, synthetic construct
  source 1..37: mol_type = other RNA; note = RTT*4 (TGA-to-TGC PAM silencing edit)
agtgtgagtgcaaaaaagaagccaaaggactgcagtg

SEQ ID NO: 3122 - RNA, 37 nt, synthetic construct
  source 1..37: mol_type = other RNA; note = RTT*1,2,3,4,5
agtgtgagtgcaaaaaagaagccaaaggacttcagtg

SEQ ID NO: 3123 - RNA, 37 nt, synthetic construct
  source 1..37: mol_type = other RNA; note = RTT*4 (TGA-to-TGT PAM silencing edit)
agtgtgagtgcaaaaaagaagccaaaggattacagtg

SEQ ID NO: 3124 - RNA, 37 nt, synthetic construct
  source 1..37: mol_type = other RNA; note = RTT*4 (TGA-to-TGC PAM silencing edit)
agtgtgagtgcaaaaaagaagccaaaggattgcagtg

SEQ ID NO: 3125 - RNA, 37 nt, synthetic construct
  source 1..37: mol_type = other RNA; note = RTT (TGAAGT-to-TGAAGG PAM silencing edit)
agtgtgagtgcaaaaaagaagccaaaggccttcagtg

SEQ ID NO: 3126 - RNA, 37 nt, synthetic construct
  source 1..37: mol_type = other RNA; note = RTT (TGAAGT-to-TGAAGC PAM silencing edit)
agtgtgagtgcaaaaaagaagccaaagggcttcagtg

SEQ ID NO: 3127 - RNA, 37 nt, synthetic construct
  source 1..37: mol_type = other RNA; note = RTT (TGAAGT-to-TGAAGA PAM silencing edit)
agtgtgagtgcaaaaaagaagccaaaggtcttcagtg

SEQ ID NO: 3128 - RNA, 38 nt, synthetic construct
  source 1..38: mol_type = other RNA; note = RTT*4 (TGA-to-TGT PAM silencing edit)
cagtgtgagtgcaaaaaagaagccaaaggactacagtg

SEQ ID NO: 3129 - RNA, 38 nt, synthetic construct
  source 1..38: mol_type = other RNA; note = RTT*4 (TGA-to-TGG PAM silencing edit)
cagtgtgagtgcaaaaaagaagccaaaggactccagtg

SEQ ID NO: 3130 - RNA, 38 nt, synthetic construct
  source 1..38: mol_type = other RNA; note = RTT*4 (TGA-to-TGC PAM silencing edit)
cagtgtgagtgcaaaaaagaagccaaaggactgcagtg

SEQ ID NO: 3131 - RNA, 38 nt, synthetic construct
  source 1..38: mol_type = other RNA; note = RTT*1,2,3,4,5
cagtgtgagtgcaaaaaagaagccaaaggacttcagtg

SEQ ID NO: 3132 - RNA, 38 nt, synthetic construct
  source 1..38: mol_type = other RNA; note = RTT*4 (TGA-to-TGT PAM silencing edit)
cagtgtgagtgcaaaaaagaagccaaaggattacagtg

SEQ ID NO: 3133 - RNA, 38 nt, synthetic construct
  source 1..38: mol_type = other RNA; note = RTT*4 (TGA-to-TGC PAM silencing edit)
cagtgtgagtgcaaaaaagaagccaaaggattgcagtg

SEQ ID NO: 3134 - RNA, 38 nt, synthetic construct
  source 1..38: mol_type = other RNA; note = RTT (TGAAGT-to-TGAAGG PAM silencing edit)
cagtgtgagtgcaaaaaagaagccaaaggccttcagtg

SEQ ID NO: 3135 - RNA, 38 nt, synthetic construct
  source 1..38: mol_type = other RNA; note = RTT (TGAAGT-to-TGAAGC PAM silencing edit)
cagtgtgagtgcaaaaaagaagccaaagggcttcagtg

SEQ ID NO: 3136 - RNA, 38 nt, synthetic construct
  source 1..38: mol_type = other RNA; note = RTT (TGAAGT-to-TGAAGA PAM silencing edit)
cagtgtgagtgcaaaaaagaagccaaaggtcttcagtg

SEQ ID NO: 3137 - RNA, 39 nt, synthetic construct
  source 1..39: mol_type = other RNA; note = RTT*4 (TGA-to-TGT PAM silencing edit)
gcagtgtgagtgcaaaaaagaagccaaaggactacagtg

SEQ ID NO: 3138 - RNA, 39 nt, synthetic construct
  source 1..39: mol_type = other RNA; note = RTT*4 (TGA-to-TGG PAM silencing edit)
gcagtgtgagtgcaaaaaagaagccaaaggactccagtg

SEQ ID NO: 3139 - RNA, 39 nt, synthetic construct
  source 1..39: mol_type = other RNA; note = RTT*4 (TGA-to-TGC PAM silencing edit)
gcagtgtgagtgcaaaaaagaagccaaaggactgcagtg

SEQ ID NO: 3140 - RNA, 39 nt, synthetic construct
  source 1..39: mol_type = other RNA; note = RTT*1,2,3,4,5
gcagtgtgagtgcaaaaaagaagccaaaggacttcagtg

SEQ ID NO: 3141 - RNA, 39 nt, synthetic construct
  source 1..39: mol_type = other RNA; note = RTT*4 (TGA-to-TGT PAM silencing edit)
gcagtgtgagtgcaaaaaagaagccaaaggattacagtg

SEQ ID NO: 3142 - RNA, 39 nt, synthetic construct
  source 1..39: mol_type = other RNA; note = RTT*4 (TGA-to-TGC PAM silencing edit)
gcagtgtgagtgcaaaaaagaagccaaaggattgcagtg

SEQ ID NO: 3143 - RNA, 39 nt, synthetic construct
  source 1..39: mol_type = other RNA; note = RTT (TGAAGT-to-TGAAGG PAM silencing edit)
gcagtgtgagtgcaaaaaagaagccaaaggccttcagtg

SEQ ID NO: 3144 - RNA, 39 nt, synthetic construct
  source 1..39: mol_type = other RNA; note = RTT (TGAAGT-to-TGAAGC PAM silencing edit)
gcagtgtgagtgcaaaaaagaagccaaagggcttcagtg

SEQ ID NO: 3145 - RNA, 39 nt, synthetic construct
  source 1..39: mol_type = other RNA; note = RTT (TGAAGT-to-TGAAGA PAM silencing edit)
gcagtgtgagtgcaaaaaagaagccaaaggtcttcagtg

SEQ ID NO: 3146 - RNA, 40 nt, synthetic construct
  source 1..40: mol_type = other RNA; note = RTT*4 (TGA-to-TGT PAM silencing edit)
ggcagtgtgagtgcaaaaaagaagccaaaggactacagtg

SEQ ID NO: 3147 - RNA, 40 nt, synthetic construct
  source 1..40: mol_type = other RNA; note = RTT*4 (TGA-to-TGG PAM silencing edit)
ggcagtgtgagtgcaaaaaagaagccaaaggactccagtg

SEQ ID NO: 3148 - RNA, 40 nt, synthetic construct
  source 1..40: mol_type = other RNA; note = RTT*4 (TGA-to-TGC PAM silencing edit)
ggcagtgtgagtgcaaaaaagaagccaaaggactgcagtg

SEQ ID NO: 3149 - RNA, 40 nt, synthetic construct
  source 1..40: mol_type = other RNA; note = RTT*1,2,3,4,5
ggcagtgtgagtgcaaaaaagaagccaaaggacttcagtg

SEQ ID NO: 3150 - RNA, 40 nt, synthetic construct
  source 1..40: mol_type = other RNA; note = RTT*4 (TGA-to-TGT PAM silencing edit)
ggcagtgtgagtgcaaaaaagaagccaaaggattacagtg

SEQ ID NO: 3151 - RNA, 40 nt, synthetic construct
  source 1..40: mol_type = other RNA; note = RTT*4 (TGA-to-TGC PAM silencing edit)
ggcagtgtgagtgcaaaaaagaagccaaaggattgcagtg

SEQ ID NO: 3152 - RNA, 40 nt, synthetic construct
  source 1..40: mol_type = other RNA; note = RTT (TGAAGT-to-TGAAGG PAM silencing edit)
ggcagtgtgagtgcaaaaaagaagccaaaggccttcagtg

SEQ ID NO: 3153 - RNA, 40 nt, synthetic construct
  source 1..40: mol_type = other RNA; note = RTT (TGAAGT-to-TGAAGC PAM silencing edit)
ggcagtgtgagtgcaaaaaagaagccaaagggcttcagtg

SEQ ID NO: 3154 - RNA, 40 nt, synthetic construct
  source 1..40: mol_type = other RNA; note = RTT (TGAAGT-to-TGAAGA PAM silencing edit)
ggcagtgtgagtgcaaaaaagaagccaaaggtcttcagtg

SEQ ID NO: 3155 - RNA, 20 nt, synthetic construct
  source 1..20: mol_type = other RNA; note = PE3 ngRNA spacer (TTCAGT PAM)
caaaaaagaagccaaaggac

SEQ ID NO: 3156 - RNA, 20 nt, synthetic construct
  source 1..20: mol_type = other RNA; note = PE3 ngRNA spacer (TTCAGT PAM)
caaaaaagaagccaaaggcc

SEQ ID NO: 3157 - RNA, 20 nt, synthetic construct
  source 1..20: mol_type = other RNA; note = PE3 ngRNA spacer (TTCAGT PAM)
caaaaaagaagccaaagggc

SEQ ID NO: 3158 - RNA, 20 nt, synthetic construct
  source 1..20: mol_type = other RNA; note = PE3 ngRNA spacer (TTCAGT PAM)
caaaaaagaagccaaaggtc

SEQ ID NO: 3159 - RNA, 20 nt, synthetic construct
  source 1..20: mol_type = other RNA; note = PE3 ngRNA spacer (TGA PAM)
gaagccaaaggactacagtg

SEQ ID NO: 3160 - RNA, 20 nt, synthetic construct
  source 1..20: mol_type = other RNA; note = PE3 ngRNA spacer (TGA PAM)
gaagccaaaggactccagtg

SEQ ID NO: 3161 - RNA, 20 nt, synthetic construct
  source 1..20: mol_type = other RNA; note = PE3 ngRNA spacer (TGA PAM)
gaagccaaaggactgcagtg

SEQ ID NO: 3162 - RNA, 140 nt, synthetic construct
  source 1..140: mol_type = other RNA; note = pegRNA
tttctctgcaggtgtcacacgttttagagctagaaatagcaagttaaaataaggctagtccgttatcaacttgaaaaagtggcaccgagtcggtgcgtgtgagtgcaaaaaagaagccaaaggactacagtgtgacacct

SEQ ID NO: 3163 - RNA, 140 nt, synthetic construct
  source 1..140: mol_type = other RNA; note = pegRNA
tttctctgcaggtgtcacacgttttagagctagaaatagcaagttaaaataaggctagtccgttatcaacttgaaaaagtggcaccgagtcggtgcgtgtgagtgcaaaaaagaagccaaaggactgcagtgtgacacct

SEQ ID NO: 3164 - RNA, 140 nt, synthetic construct
  source 1..140: mol_type = other RNA; note = pegRNA
tttctctgcaggtgtcacacgttttagagctagaaatagcaagttaaaataaggctagtccgttatcaacttgaaaaagtggcaccgagtcggtgcgtgtgagtgcaaaaaagaagccaaaggacttcagtgtgacacct

SEQ ID NO: 3165 - RNA, 140 nt, synthetic construct
  source 1..140: mol_type = other RNA; note = pegRNA
tttctctgcaggtgtcacacgttttagagctagaaatagcaagttaaaataaggctagtccgttatcaacttgaaaaagtggcaccgagtcggtgcgtgtgagtgcaaaaaagaagccaaaggattacagtgtgacacct

SEQ ID NO: 3166 - RNA, 140 nt, synthetic construct
  source 1..140: mol_type = other RNA; note = pegRNA
tttctctgcaggtgtcacacgttttagagctagaaatagcaagttaaaataaggctagtccgttatcaacttgaaaaagtggcaccgagtcggtgcgtgtgagtgcaaaaaagaagccaaaggattgcagtgtgacacct

SEQ ID NO: 3167 - RNA, 141 nt, synthetic construct
  source 1..141: mol_type = other RNA; note = pegRNA
tttctctgcaggtgtcacacgttttagagctagaaatagcaagttaaaataaggctagtccgttatcaacttgaaaaagtggcaccgagtcggtgcagtgtgagtgcaaaaaagaagccaaaggactacagtgtgacacct

SEQ ID NO: 3168 - RNA, 141 nt, synthetic construct
  source 1..141: mol_type = other RNA; note = pegRNA
tttctctgcaggtgtcacacgttttagagctagaaatagcaagttaaaataaggctagtccgttatcaacttgaaaaagtggcaccgagtcggtgcagtgtgagtgcaaaaaagaagccaaaggactgcagtgtgacacct

SEQ ID NO: 3169 - RNA, 141 nt, synthetic construct
  source 1..141: mol_type = other RNA; note = pegRNA
tttctctgcaggtgtcacacgttttagagctagaaatagcaagttaaaataaggctagtccgttatcaacttgaaaaagtggcaccgagtcggtgcagtgtgagtgcaaaaaagaagccaaaggattacagtgtgacacct

SEQ ID NO: 3170 - RNA, 141 nt, synthetic construct
  source 1..141: mol_type = other RNA; note = pegRNA
tttctctgcaggtgtcacacgttttagagctagaaatagcaagttaaaataaggctagtccgttatcaacttgaaaaagtggcaccgagtcggtgcagtgtgagtgcaaaaaagaagccaaaggattgcagtgtgacacct

SEQ ID NO: 3171 - RNA, 141 nt, synthetic construct
  source 1..141: mol_type = other RNA; note = pegRNA
tttctctgcaggtgtcacacgttttagagctagaaatagcaagttaaaataaggctagtccgttatcaacttgaaaaagtggcaccgagtcggtgcgtgtgagtgcaaaaaagaagccaaaggactacagtgtgacacctg

SEQ ID NO: 3172 - RNA, 141 nt, synthetic construct
  source 1..141: mol_type = other RNA; note = pegRNA
tttctctgcaggtgtcacacgttttagagctagaaatagcaagttaaaataaggctagtccgttatcaacttgaaaaagtggcaccgagtcggtgcgtgtgagtgcaaaaaagaagccaaaggactgcagtgtgacacctg

SEQ ID NO: 3173 - RNA, 141 nt, synthetic construct
  source 1..141: mol_type = other RNA; note = pegRNA
tttctctgcaggtgtcacacgttttagagctagaaatagcaagttaaaataaggctagtccgttatcaacttgaaaaagtggcaccgagtcggtgcgtgtgagtgcaaaaaagaagccaaaggattacagtgtgacacctg

SEQ ID NO: 3174 - RNA, 141 nt, synthetic construct
  source 1..141: mol_type = other RNA; note = pegRNA
tttctctgcaggtgtcacacgttttagagctagaaatagcaagttaaaataaggctagtccgttatcaacttgaaaaagtggcaccgagtcggtgcgtgtgagtgcaaaaaagaagccaaaggattgcagtgtgacacctg

SEQ ID NO: 3175 - RNA, 142 nt, synthetic construct
  source 1..142: mol_type = other RNA; note = pegRNA
tttctctgcaggtgtcacacgttttagagctagaaatagcaagttaaaataaggctagtccgttatcaacttgaaaaagtggcaccgagtcggtgcagtgtgagtgcaaaaaagaagccaaaggactacagtgtgacacctg

SEQ ID NO: 3176 - RNA, 142 nt, synthetic construct
  source 1..142: mol_type = other RNA; note = pegRNA
tttctctgcaggtgtcacacgttttagagctagaaatagcaagttaaaataaggctagtccgttatcaacttgaaaaagtggcaccgagtcggtgcagtgtgagtgcaaaaaagaagccaaaggactgcagtgtgacacctg

SEQ ID NO: 3177 - RNA, 142 nt, synthetic construct
  source 1..142: mol_type = other RNA; note = pegRNA
tttctctgcaggtgtcacacgttttagagctagaaatagcaagttaaaataaggctagtccgttatcaacttgaaaaagtggcaccgagtcggtgcagtgtgagtgcaaaaaagaagccaaaggattacagtgtgacacctg

SEQ ID NO: 3178 - RNA, 142 nt, synthetic construct
  source 1..142: mol_type = other RNA; note = pegRNA
tttctctgcaggtgtcacacgttttagagctagaaatagcaagttaaaataaggctagtccgttatcaacttgaaaaagtggcaccgagtcggtgcagtgtgagtgcaaaaaagaagccaaaggattgcagtgtgacacctg

SEQ ID NO: 3179 - RNA, 142 nt, synthetic construct
  source 1..142: mol_type = other RNA; note = pegRNA
tttctctgcaggtgtcacacgttttagagctagaaatagcaagttaaaataaggctagtccgttatcaacttgaaaaagtggcaccgagtcggtgccagtgtgagtgcaaaaaagaagccaaaggactacagtgtgacacct

SEQ ID NO: 3180 - RNA, 142 nt, synthetic construct
  source 1..142: mol_type = other RNA; note = pegRNA
tttctctgcaggtgtcacacgttttagagctagaaatagcaagttaaaataaggctagtccgttatcaacttgaaaaagtggcaccgagtcggtgccagtgtgagtgcaaaaaagaagccaaaggactgcagtgtgacacct

SEQ ID NO: 3181 - RNA, 142 nt, synthetic construct
  source 1..142: mol_type = other RNA; note = pegRNA
tttctctgcaggtgtcacacgttttagagctagaaatagcaagttaaaataaggctagtccgttatcaacttgaaaaagtggcaccgagtcggtgccagtgtgagtgcaaaaaagaagccaaaggattacagtgtgacacct

SEQ ID NO: 3182 - RNA, 142 nt, synthetic construct
  source 1..142: mol_type = other RNA; note = pegRNA
tttctctgcaggtgtcacacgttttagagctagaaatagcaagttaaaataaggctagtccgttatcaacttgaaaaagtggcaccgagtcggtgccagtgtgagtgcaaaaaagaagccaaaggattgcagtgtgacacct

SEQ ID NO: 3183 - RNA, 142 nt, synthetic construct
  source 1..142: mol_type = other RNA; note = pegRNA
tttctctgcaggtgtcacacgttttagagctagaaatagcaagttaaaataaggctagtccgttatcaacttgaaaaagtggcaccgagtcggtgcgtgtgagtgcaaaaaagaagccaaaggactacagtgtgacacctgc

SEQ ID NO: 3184 - RNA, 142 nt, synthetic construct
  source 1..142: mol_type = other RNA; note = pegRNA
tttctctgcaggtgtcacacgttttagagctagaaatagcaagttaaaataaggctagtccgttatcaacttgaaaaagtggcaccgagtcggtgcgtgtgagtgcaaaaaagaagccaaaggactgcagtgtgacacctgc

SEQ ID NO: 3185 - RNA, 142 nt, synthetic construct
  source 1..142: mol_type = other RNA; note = pegRNA
tttctctgcaggtgtcacacgttttagagctagaaatagcaagttaaaataaggctagtccgttatcaacttgaaaaagtggcaccgagtcggtgcgtgtgagtgcaaaaaagaagccaaaggacttcagtgtgacacctgc

SEQ ID NO: 3186 - RNA, 142 nt, synthetic construct
  source 1..142: mol_type = other RNA; note = pegRNA
tttctctgcaggtgtcacacgttttagagctagaaatagcaagttaaaataaggctagtccgttatcaacttgaaaaagtggcaccgagtcggtgcgtgtgagtgcaaaaaagaagccaaaggattacagtgtgacacctgc

SEQ ID NO: 3187 - RNA, 142 nt, synthetic construct
  source 1..142: mol_type = other RNA; note = pegRNA
tttctctgcaggtgtcacacgttttagagctagaaatagcaagttaaaataaggctagtccgttatcaacttgaaaaagtggcaccgagtcggtgcgtgtgagtgcaaaaaagaagccaaaggattgcagtgtgacacctgc

SEQ ID NO: 3188 - RNA, 143 nt, synthetic construct
  source 1..143: mol_type = other RNA; note = pegRNA
tttctctgcaggtgtcacacgttttagagctagaaatagcaagttaaaataaggctagtccgttatcaacttgaaaaagtggcaccgagtcggtgcagtgtgagtgcaaaaaagaagccaaaggactacagtgtgacacctgc

SEQ ID NO: 3189 - RNA, 143 nt, synthetic construct
  source 1..143: mol_type = other RNA; note = pegRNA
tttctctgcaggtgtcacacgttttagagctagaaatagcaagttaaaataaggctagtccgttatcaacttgaaaaagtggcaccgagtcggtgcagtgtgagtgcaaaaaagaagccaaaggactgcagtgtgacacctgc

SEQ ID NO: 3190 - RNA, 143 nt, synthetic construct
  source 1..143: mol_type = other RNA; note = pegRNA
tttctctgcaggtgtcacacgttttagagctagaaatagcaagttaaaataaggctagtccgttatcaacttgaaaaagtggcaccgagtcggtgcagtgtgagtgcaaaaaagaagccaaaggattacagtgtgacacctgc

SEQ ID NO: 3191 - RNA, 143 nt, synthetic construct
  source 1..143: mol_type = other RNA; note = pegRNA
tttctctgcaggtgtcacacgttttagagctagaaatagcaagttaaaataaggctagtccgttatcaacttgaaaaagtggcaccgagtcggtgcagtgtgagtgcaaaaaagaagccaaaggattgcagtgtgacacctgc

SEQ ID NO: 3192 - RNA, 143 nt, synthetic construct
  source 1..143: mol_type = other RNA; note = pegRNA
tttctctgcaggtgtcacacgttttagagctagaaatagcaagttaaaataaggctagtccgttatcaacttgaaaaagtggcaccgagtcggtgccagtgtgagtgcaaaaaagaagccaaaggactacagtgtgacacctg

SEQ ID NO: 3193 - RNA, 143 nt, synthetic construct
  source 1..143: mol_type = other RNA; note = pegRNA
tttctctgcaggtgtcacacgttttagagctagaaatagcaagttaaaataaggctagtccgttatcaacttgaaaaagtggcaccgagtcggtgccagtgtgagtgcaaaaaagaagccaaaggactgcagtgtgacacctg

SEQ ID NO: 3194 - RNA, 143 nt, synthetic construct
  source 1..143: mol_type = other RNA; note = pegRNA
tttctctgcaggtgtcacacgttttagagctagaaatagcaagttaaaataaggctagtccgttatcaacttgaaaaagtggcaccgagtcggtgccagtgtgagtgcaaaaaagaagccaaaggattacagtgtgacacctg

SEQ ID NO: 3195 - RNA, 143 nt, synthetic construct
  source 1..143: mol_type = other RNA; note = pegRNA
tttctctgcaggtgtcacacgttttagagctagaaatagcaagttaaaataaggctagtccgttatcaacttgaaaaagtggcaccgagtcggtgccagtgtgagtgcaaaaaagaagccaaaggattgcagtgtgacacctg

SEQ ID NO: 3196 - RNA, 143 nt, synthetic construct
  source 1..143: mol_type = other RNA; note = pegRNA
tttctctgcaggtgtcacacgttttagagctagaaatagcaagttaaaataaggctagtccgttatcaacttgaaaaagtggcaccgagtcggtgcgcagtgtgagtgcaaaaaagaagccaaaggactacagtgtgacacct

SEQ ID NO: 3197 - RNA, 143 nt, synthetic construct
  source 1..143: mol_type = other RNA; note = pegRNA
tttctctgcaggtgtcacacgttttagagctagaaatagcaagttaaaataaggctagtccgttatcaacttgaaaaagtggcaccgagtcggtgcgcagtgtgagtgcaaaaaagaagccaaaggactgcagtgtgacacct

SEQ ID NO: 3198 - RNA, 143 nt, synthetic construct
  source 1..143: mol_type = other RNA; note = pegRNA
tttctctgcaggtgtcacacgttttagagctagaaatagcaagttaaaataaggctagtccgttatcaacttgaaaaagtggcaccgagtcggtgcgcagtgtgagtgcaaaaaagaagccaaaggacttcagtgtgacacct

SEQ ID NO: 3199 - RNA, 143 nt, synthetic construct
  source 1..143: mol_type = other RNA; note = pegRNA
tttctctgcaggtgtcacacgttttagagctagaaatagcaagttaaaataaggctagtccgttatcaacttgaaaaagtggcaccgagtcggtgcgcagtgtgagtgcaaaaaagaagccaaaggattacagtgtgacacct

SEQ ID NO: 3200 - RNA, 143 nt, synthetic construct
  source 1..143: mol_type = other RNA; note = pegRNA
tttctctgcaggtgtcacacgttttagagctagaaatagcaagttaaaataaggctagtccgttatcaacttgaaaaagtggcaccgagtcggtgcgcagtgtgagtgcaaaaaagaagccaaaggattgcagtgtgacacct

SEQ ID NO: 3201 - RNA, 143 nt, synthetic construct
  source 1..143: mol_type = other RNA; note = pegRNA
tttctctgcaggtgtcacacgttttagagctagaaatagcaagttaaaataaggctagtccgttatcaacttgaaaaagtggcaccgagtcggtgcgtgtgagtgcaaaaaagaagccaaaggactacagtgtgacacctgca

SEQ ID NO: 3202 - RNA, 143 nt, synthetic construct
  source 1..143: mol_type = other RNA; note = pegRNA
tttctctgcaggtgtcacacgttttagagctagaaatagcaagttaaaataaggctagtccgttatcaacttgaaaaagtggcaccgagtcggtgcgtgtgagtgcaaaaaagaagccaaaggactgcagtgtgacacctgca

SEQ ID NO: 3203 - RNA, 143 nt, synthetic construct
  source 1..143: mol_type = other RNA; note = pegRNA
tttctctgcaggtgtcacacgttttagagctagaaatagcaagttaaaataaggctagtccgttatcaacttgaaaaagtggcaccgagtcggtgcgtgtgagtgcaaaaaagaagccaaaggattacagtgtgacacctgca

SEQ ID NO: 3204 - RNA, 143 nt, synthetic construct
  source 1..143: mol_type = other RNA; note = pegRNA
tttctctgcaggtgtcacacgttttagagctagaaatagcaagttaaaataaggctagtccgttatcaacttgaaaaagtggcaccgagtcggtgcgtgtgagtgcaaaaaagaagccaaaggattgcagtgtgacacctgca

SEQ ID NO: 3205 - RNA, 144 nt, synthetic construct
  source 1..144: mol_type = other RNA; note = pegRNA
tttctctgcaggtgtcacacgttttagagctagaaatagcaagttaaaataaggctagtccgttatcaacttgaaaaagtggcaccgagtcggtgcagtgtgagtgcaaaaaagaagccaaaggactacagtgtgacacctgca

SEQ ID NO: 3206 - RNA, 144 nt, synthetic construct
  source 1..144: mol_type = other RNA; note = pegRNA
tttctctgcaggtgtcacacgttttagagctagaaatagcaagttaaaataaggctagtccgttatcaacttgaaaaagtggcaccgagtcggtgcagtgtgagtgcaaaaaagaagccaaaggactgcagtgtgacacctgca

SEQ ID NO: 3207 - RNA, 144 nt, synthetic construct
  source 1..144: mol_type = other RNA; note = pegRNA
tttctctgcaggtgtcacacgttttagagctagaaatagcaagttaaaataaggctagtccgttatcaacttgaaaaagtggcaccgagtcggtgcagtgtgagtgcaaaaaagaagccaaaggattacagtgtgacacctgca

SEQ ID NO: 3208 - RNA, 144 nt, synthetic construct
  source 1..144: mol_type = other RNA; note = pegRNA
tttctctgcaggtgtcacacgttttagagctagaaatagcaagttaaaataaggctagtccgttatcaacttgaaaaagtggcaccgagtcggtgcagtgtgagtgcaaaaaagaagccaaaggattgcagtgtgacacctgca

SEQ ID NO: 3209 - RNA, 144 nt, synthetic construct
  source 1..144: mol_type = other RNA; note = pegRNA
tttctctgcaggtgtcacacgttttagagctagaaatagcaagttaaaataaggctagtccgttatcaacttgaaaaagtggcaccgagtcggtgccagtgtgagtgcaaaaaagaagccaaaggactacagtgtgacacctgc

SEQ ID NO: 3210 - RNA, 144 nt, synthetic construct
  source 1..144: mol_type = other RNA; note = pegRNA
tttctctgcaggtgtcacacgttttagagctagaaatagcaagttaaaataaggctagtccgttatcaacttgaaaaagtggcaccgagtcggtgccagtgtgagtgcaaaaaagaagccaaaggactgcagtgtgacacctgc

SEQ ID NO: 3211 - RNA, 144 nt, synthetic construct
  source 1..144: mol_type = other RNA; note = pegRNA
tttctctgcaggtgtcacacgttttagagctagaaatagcaagttaaaataaggctagtccgttatcaacttgaaaaagtggcaccgagtcggtgccagtgtgagtgcaaaaaagaagccaaaggattacagtgtgacacctgc

SEQ ID NO: 3212 - RNA, 144 nt, synthetic construct
  source 1..144: mol_type = other RNA; note = pegRNA
tttctctgcaggtgtcacacgttttagagctagaaatagcaagttaaaataaggctagtccgttatcaacttgaaaaagtggcaccgagtcggtgccagtgtgagtgcaaaaaagaagccaaaggattgcagtgtgacacctgc

SEQ ID NO: 3213 - RNA, 144 nt, synthetic construct
  source 1..144: mol_type = other RNA; note = pegRNA
tttctctgcaggtgtcacacgttttagagctagaaatagcaagttaaaataaggctagtccgttatcaacttgaaaaagtggcaccgagtcggtgcgcagtgtgagtgcaaaaaagaagccaaaggactacagtgtgacacctg

SEQ ID NO: 3214 - RNA, 144 nt, synthetic construct
  source 1..144: mol_type = other RNA; note = pegRNA
tttctctgcaggtgtcacacgttttagagctagaaatagcaagttaaaataaggctagtccgttatcaacttgaaaaagtggcaccgagtcggtgcgcagtgtgagtgcaaaaaagaagccaaaggactgcagtgtgacacctg

SEQ ID NO: 3215 - RNA, 144 nt, synthetic construct
  source 1..144: mol_type = other RNA; note = pegRNA
tttctctgcaggtgtcacacgttttagagctagaaatagcaagttaaaataaggctagtccgttatcaacttgaaaaagtggcaccgagtcggtgcgcagtgtgagtgcaaaaaagaagccaaaggattacagtgtgacacctg

SEQ ID NO: 3216 - RNA, 144 nt, synthetic construct
  source 1..144: mol_type = other RNA; note = pegRNA
tttctctgcaggtgtcacacgttttagagctagaaatagcaagttaaaataaggctagtccgttatcaacttgaaaaagtggcaccgagtcggtgcgcagtgtgagtgcaaaaaagaagccaaaggattgcagtgtgacacctg

SEQ ID NO: 3217 - RNA, 144 nt, synthetic construct
  source 1..144: mol_type = other RNA; note = pegRNA
tttctctgcaggtgtcacacgttttagagctagaaatagcaagttaaaataaggctagtccgttatcaacttgaaaaagtggcaccgagtcggtgcggcagtgtgagtgcaaaaaagaagccaaaggactacagtgtgacacct

SEQ ID NO: 3218 - RNA, 144 nt, synthetic construct
  source 1..144: mol_type = other RNA; note = pegRNA
tttctctgcaggtgtcacacgttttagagctagaaatagcaagttaaaataaggctagtccgttatcaacttgaaaaagtggcaccgagtcggtgcggcagtgtgagtgcaaaaaagaagccaaaggactgcagtgtgacacct

SEQ ID NO: 3219 - RNA, 144 nt, synthetic construct
  source 1..144: mol_type = other RNA; note = pegRNA
tttctctgcaggtgtcacacgttttagagctagaaatagcaagttaaaataaggctagtccgttatcaacttgaaaaagtggcaccgagtcggtgcggcagtgtgagtgcaaaaaagaagccaaaggacttcagtgtgacacct

SEQ ID NO: 3220 - RNA, 144 nt, synthetic construct
  source 1..144: mol_type = other RNA; note = pegRNA
tttctctgcaggtgtcacacgttttagagctagaaatagcaagttaaaataaggctagtccgttatcaacttgaaaaagtggcaccgagtcggtgcggcagtgtgagtgcaaaaaagaagccaaaggattacagtgtgacacct

SEQ ID NO: 3221 - RNA, 144 nt, synthetic construct
  source 1..144: mol_type = other RNA; note = pegRNA
tttctctgcaggtgtcacacgttttagagctagaaatagcaagttaaaataaggctagtccgttatcaacttgaaaaagtggcaccgagtcggtgcggcagtgtgagtgcaaaaaagaagccaaaggattgcagtgtgacacct

SEQ ID NO: 3222 - RNA, 144 nt, synthetic construct
  source 1..144: mol_type = other RNA; note = pegRNA
tttctctgcaggtgtcacacgttttagagctagaaatagcaagttaaaataaggctagtccgttatcaacttgaaaaagtggcaccgagtcggtgcgtgtgagtgcaaaaaagaagccaaaggactacagtgtgacacctgcag

SEQ ID NO: 3223 - RNA, 144 nt, synthetic construct
  source 1..144: mol_type = other RNA; note = pegRNA
tttctctgcaggtgtcacacgttttagagctagaaatagcaagttaaaataaggctagtccgttatcaacttgaaaaagtggcaccgagtcggtgcgtgtgagtgcaaaaaagaagccaaaggactacagtgtgacaccttttt

SEQ ID NO: 3224 - RNA, 144 nt, synthetic construct
  source 1..144: mol_type = other RNA; note = pegRNA
tttctctgcaggtgtcacacgttttagagctagaaatagcaagttaaaataaggctagtccgttatcaacttgaaaaagtggcaccgagtcggtgcgtgtgagtgcaaaaaagaagccaaaggactgcagtgtgacacctgcag

SEQ ID NO: 3225 - RNA, 144 nt, synthetic construct
  source 1..144: mol_type = other RNA; note = pegRNA
tttctctgcaggtgtcacacgttttagagctagaaatagcaagttaaaataaggctagtccgttatcaacttgaaaaagtggcaccgagtcggtgcgtgtgagtgcaaaaaagaagccaaaggactgcagtgtgacaccttttt

SEQ ID NO: 3226 - RNA, 144 nt, synthetic construct
  source 1..144: mol_type = other RNA; note = pegRNA
tttctctgcaggtgtcacacgttttagagctagaaatagcaagttaaaataaggctagtccgttatcaacttgaaaaagtggcaccgagtcggtgcgtgtgagtgcaaaaaagaagccaaaggacttcagtgtgacacctgcag

SEQ ID NO: 3227 - RNA, 144 nt, synthetic construct
  source 1..144: mol_type = other RNA; note = pegRNA
tttctctgcaggtgtcacacgttttagagctagaaatagcaagttaaaataaggctagtccgttatcaacttgaaaaagtggcaccgagtcggtgcgtgtgagtgcaaaaaagaagccaaaggacttcagtgtgacaccttttt

SEQ ID NO: 3228 - RNA, 144 nt, synthetic construct
  source 1..144: mol_type = other RNA; note = pegRNA
tttctctgcaggtgtcacacgttttagagctagaaatagcaagttaaaataaggctagtccgttatcaacttgaaaaagtggcaccgagtcggtgcgtgtgagtgcaaaaaagaagccaaaggattacagtgtgacacctgcag

SEQ ID NO: 3229 - RNA, 144 nt, synthetic construct
  source 1..144: mol_type = other RNA; note = pegRNA
tttctctgcaggtgtcacacgttttagagctagaaatagcaagttaaaataaggctagtccgttatcaacttgaaaaagtggcaccgagtcggtgcgtgtgagtgcaaaaaagaagccaaaggattacagtgtgacaccttttt

SEQ ID NO: 3230 - RNA, 144 nt, synthetic construct
  source 1..144: mol_type = other RNA; note = pegRNA
tttctctgcaggtgtcacacgttttagagctagaaatagcaagttaaaataaggctagtccgttatcaacttgaaaaagtggcaccgagtcggtgcgtgtgagtgcaaaaaagaagccaaaggattgcagtgtgacacctgcag

SEQ ID NO: 3231 - RNA, 144 nt, synthetic construct
  source 1..144: mol_type = other RNA; note = pegRNA
tttctctgcaggtgtcacacgttttagagctagaaatagcaagttaaaataaggctagtccgttatcaacttgaaaaagtggcaccgagtcggtgcgtgtgagtgcaaaaaagaagccaaaggattgcagtgtgacaccttttt

SEQ ID NO: 3232 - RNA, 145 nt, synthetic construct
  source 1..145: mol_type = other RNA; note = pegRNA
tttctctgcaggtgtcacacgttttagagctagaaatagcaagttaaaataaggctagtccgttatcaacttgaaaaagtggcaccgagtcggtgcagtgtgagtgcaaaaaagaagccaaaggactacagtgtgacacctgcag

SEQ ID NO: 3233 - RNA, 145 nt, synthetic construct
  source 1..145: mol_type = other RNA; note = pegRNA
tttctctgcaggtgtcacacgttttagagctagaaatagcaagttaaaataaggctagtccgttatcaacttgaaaaagtggcaccgagtcggtgcagtgtgagtgcaaaaaagaagccaaaggactacagtgtgacaccttttt

SEQ ID NO: 3234 - RNA, 145 nt, synthetic construct
  source 1..145: mol_type = other RNA; note = pegRNA
tttctctgcaggtgtcacacgttttagagctagaaatagcaagttaaaataaggctagtccgttatcaacttgaaaaagtggcaccgagtcggtgcagtgtgagtgcaaaaaagaagccaaaggactgcagtgtgacacctgcag

SEQ ID NO: 3235 - RNA, 145 nt, synthetic construct
  source 1..145: mol_type = other RNA; note = pegRNA
tttctctgcaggtgtcacacgttttagagctagaaatagcaagttaaaataaggctagtccgttatcaacttgaaaaagtggcaccgagtcggtgcagtgtgagtgcaaaaaagaagccaaaggactgcagtgtgacaccttttt

SEQ ID NO: 3236 - RNA, 145 nt, synthetic construct
  source 1..145: mol_type = other RNA; note = pegRNA
tttctctgcaggtgtcacacgttttagagctagaaatagcaagttaaaataaggctagtccgttatcaacttgaaaaagtggcaccgagtcggtgcagtgtgagtgcaaaaaagaagccaaaggattacagtgtgacacctgcag

SEQ ID NO: 3237 - RNA, 145 nt, synthetic construct
  source 1..145: mol_type = other RNA; note = pegRNA
tttctctgcaggtgtcacacgttttagagctagaaatagcaagttaaaataaggctagtccgttatcaacttgaaaaagtggcaccgagtcggtgcagtgtgagtgcaaaaaagaagccaaaggattacagtgtgacaccttttt

SEQ ID NO: 3238 - RNA, 145 nt, synthetic construct
  source 1..145: mol_type = other RNA; note = pegRNA
tttctctgcaggtgtcacacgttttagagctagaaatagcaagttaaaataaggctagtccgttatcaacttgaaaaagtggcaccgagtcggtgcagtgtgagtgcaaaaaagaagccaaaggattgcagtgtgacacctgcag

SEQ ID NO: 3239 - RNA, 145 nt, synthetic construct
  source 1..145: mol_type = other RNA; note = pegRNA
tttctctgcaggtgtcacacgttttagagctagaaatagcaagttaaaataaggctagtccgttatcaacttgaaaaagtggcaccgagtcggtgcagtgtgagtgcaaaaaagaagccaaaggattgcagtgtgacaccttttt

SEQ ID NO: 3240 - RNA, 145 nt, synthetic construct
  source 1..145: mol_type = other RNA; note = pegRNA
tttctctgcaggtgtcacacgttttagagctagaaatagcaagttaaaataaggctagtccgttatcaacttgaaaaagtggcaccgagtcggtgccagtgtgagtgcaaaaaagaagccaaaggactacagtgtgacacctgca

SEQ ID NO: 3241 - RNA, 145 nt, synthetic construct
  source 1..145: mol_type = other RNA; note = pegRNA
tttctctgcaggtgtcacacgttttagagctagaaatagcaagttaaaataaggctagtccgttatcaacttgaaaaagtggcaccgagtcggtgccagtgtgagtgcaaaaaagaagccaaaggactgcagtgtgacacctgca

SEQ ID NO: 3242 - RNA, 145 nt, synthetic construct
  source 1..145: mol_type = other RNA; note = pegRNA
tttctctgcaggtgtcacacgttttagagctagaaatagcaagttaaaataaggctagtccgttatcaacttgaaaaagtggcaccgagtcggtgccagtgtgagtgcaaaaaagaagccaaaggattacagtgtgacacctgca

SEQ ID NO: 3243 - RNA, 145 nt, synthetic construct
  source 1..145: mol_type = other RNA; note = pegRNA
tttctctgcaggtgtcacacgttttagagctagaaatagcaagttaaaataaggctagtccgttatcaacttgaaaaagtggcaccgagtcggtgccagtgtgagtgcaaaaaagaagccaaaggattgcagtgtgacacctgca

SEQ ID NO: 3244 - RNA, 145 nt, synthetic construct
  source 1..145: mol_type = other RNA; note = pegRNA
tttctctgcaggtgtcacacgttttagagctagaaatagcaagttaaaataaggctagtccgttatcaacttgaaaaagtggcaccgagtcggtgcgcagtgtgagtgcaaaaaagaagccaaaggactacagtgtgacacctgc

SEQ ID NO: 3245 - RNA, 145 nt, synthetic construct
  source 1..145: mol_type = other RNA; note = pegRNA
tttctctgcaggtgtcacacgttttagagctagaaatagcaagttaaaataaggctagtccgttatcaacttgaaaaagtggcaccgagtcggtgcgcagtgtgagtgcaaaaaagaagccaaaggactgcagtgtgacacctgc

SEQ ID NO: 3246 - RNA, 145 nt, synthetic construct
  source 1..145: mol_type = other RNA; note = pegRNA
tttctctgcaggtgtcacacgttttagagctagaaatagcaagttaaaataaggctagtccgttatcaacttgaaaaagtggcaccgagtcggtgcgcagtgtgagtgcaaaaaagaagccaaaggacttcagtgtgacacctgc

SEQ ID NO: 3247 - RNA, 145 nt, synthetic construct
  source 1..145: mol_type = other RNA; note = pegRNA
tttctctgcaggtgtcacacgttttagagctagaaatagcaagttaaaataaggctagtccgttatcaacttgaaaaagtggcaccgagtcggtgcgcagtgtgagtgcaaaaaagaagccaaaggattacagtgtgacacctgc

SEQ ID NO: 3248 - RNA, 145 nt, synthetic construct
  source 1..145: mol_type = other RNA; note = pegRNA
tttctctgcaggtgtcacacgttttagagctagaaatagcaagttaaaataaggctagtccgttatcaacttgaaaaagtggcaccgagtcggtgcgcagtgtgagtgcaaaaaagaagccaaaggattgcagtgtgacacctgc

SEQ ID NO: 3249 - RNA, 145 nt, synthetic construct
  source 1..145: mol_type = other RNA; note = pegRNA
tttctctgcaggtgtcacacgttttagagctagaaatagcaagttaaaataaggctagtccgttatcaacttgaaaaagtggcaccgagtcggtgcggcagtgtgagtgcaaaaaagaagccaaaggactacagtgtgacacctg

SEQ ID NO: 3250 - RNA, 145 nt, synthetic construct
  source 1..145: mol_type = other RNA; note = pegRNA
tttctctgcaggtgtcacacgttttagagctagaaatagcaagttaaaataaggctagtccgttatcaacttgaaaaagtggcaccgagtcggtgcggcagtgtgagtgcaaaaaagaagccaaaggactgcagtgtgacacctg

SEQ ID NO: 3251 - RNA, 145 nt, synthetic construct
  source 1..145: mol_type = other RNA; note = pegRNA
tttctctgcaggtgtcacacgttttagagctagaaatagcaagttaaaataaggctagtccgttatcaacttgaaaaagtggcaccgagtcggtgcggcagtgtgagtgcaaaaaagaagccaaaggattacagtgtgacacctg

SEQ ID NO: 3252 - RNA, 145 nt, synthetic construct
  source 1..145: mol_type = other RNA; note = pegRNA
tttctctgcaggtgtcacacgttttagagctagaaatagcaagttaaaataaggctagtccgttatcaacttgaaaaagtggcaccgagtcggtgcggcagtgtgagtgcaaaaaagaagccaaaggattgcagtgtgacacctg

SEQ ID NO: 3253 - RNA, 145 nt, synthetic construct
  source 1..145: mol_type = other RNA; note = pegRNA
tttctctgcaggtgtcacacgttttagagctagaaatagcaagttaaaataaggctagtccgttatcaacttgaaaaagtggcaccgagtcggtgcgtgtgagtgcaaaaaagaagccaaaggactacagtgtgacacctgcaga

SEQ ID NO: 3254 - RNA, 145 nt, synthetic construct
  source 1..145: mol_type = other RNA; note = pegRNA
tttctctgcaggtgtcacacgttttagagctagaaatagcaagttaaaataaggctagtccgttatcaacttgaaaaagtggcaccgagtcggtgcgtgtgagtgcaaaaaagaagccaaaggactacagtgtgacacctgtttt

SEQ ID NO: 3255 - RNA, 145 nt, synthetic construct
  source 1..145: mol_type = other RNA; note = pegRNA
tttctctgcaggtgtcacacgttttagagctagaaatagcaagttaaaataaggctagtccgttatcaacttgaaaaagtggcaccgagtcggtgcgtgtgagtgcaaaaaagaagccaaaggactgcagtgtgacacctgcaga

SEQ ID NO: 3256 - RNA, 145 nt, synthetic construct
  source 1..145: mol_type = other RNA; note = pegRNA
tttctctgcaggtgtcacacgttttagagctagaaatagcaagttaaaataaggctagtccgttatcaacttgaaaaagtggcaccgagtcggtgcgtgtgagtgcaaaaaagaagccaaaggactgcagtgtgacacctgtttt

SEQ ID NO: 3257 - RNA, 145 nt, synthetic construct
  source 1..145: mol_type = other RNA; note = pegRNA
tttctctgcaggtgtcacacgttttagagctagaaatagcaagttaaaataaggctagtccgttatcaacttgaaaaagtggcaccgagtcggtgcgtgtgagtgcaaaaaagaagccaaaggattacagtgtgacacctgcaga

SEQ ID NO: 3258 - RNA, 145 nt, synthetic construct
  source 1..145: mol_type = other RNA; note = pegRNA
tttctctgcaggtgtcacacgttttagagctagaaatagcaagttaaaataaggctagtccgttatcaacttgaaaaagtggcaccgagtcggtgcgtgtgagtgcaaaaaagaagccaaaggattacagtgtgacacctgtttt

SEQ ID NO: 3259 - RNA, 145 nt, synthetic construct
  source 1..145: mol_type = other RNA; note = pegRNA
tttctctgcaggtgtcacacgttttagagctagaaatagcaagttaaaataaggctagtccgttatcaacttgaaaaagtggcaccgagtcggtgcgtgtgagtgcaaaaaagaagccaaaggattgcagtgtgacacctgcaga

SEQ ID NO: 3260 - RNA, 145 nt, synthetic construct
  source 1..145: mol_type = other RNA; note = pegRNA
tttctctgcaggtgtcacacgttttagagctagaaatagcaagttaaaataaggctagtccgttatcaacttgaaaaagtggcaccgagtcggtgcgtgtgagtgcaaaaaagaagccaaaggattgcagtgtgacacctgtttt

SEQ ID NO: 3261 - RNA, 146 nt, synthetic construct
  source 1..146: mol_type = other RNA; note = pegRNA
tttctctgcaggtgtcacacgttttagagctagaaatagcaagttaaaataaggctagtccgttatcaacttgaaaaagtggcaccgagtcggtgcagtgtgagtgcaaaaaagaagccaaaggactacagtgtgacacctgcaga

SEQ ID NO: 3262 - RNA, 146 nt, synthetic construct
  source 1..146: mol_type = other RNA; note = pegRNA
tttctctgcaggtgtcacacgttttagagctagaaatagcaagttaaaataaggctagtccgttatcaacttgaaaaagtggcaccgagtcggtgcagtgtgagtgcaaaaaagaagccaaaggactacagtgtgacacctgtttt

SEQ ID NO: 3263 - RNA, 146 nt, synthetic construct
  source 1..146: mol_type = other RNA; note = pegRNA
tttctctgcaggtgtcacacgttttagagctagaaatagcaagttaaaataaggctagtccgttatcaacttgaaaaagtggcaccgagtcggtgcagtgtgagtgcaaaaaagaagccaaaggactgcagtgtgacacctgcaga

SEQ ID NO: 3264 - RNA, 146 nt, synthetic construct
  source 1..146: mol_type = other RNA; note = pegRNA
tttctctgcaggtgtcacacgttttagagctagaaatagcaagttaaaataaggctagtccgttatcaacttgaaaaagtggcaccgagtcggtgcagtgtgagtgcaaaaaagaagccaaaggactgcagtgtgacacctgtttt

SEQ ID NO: 3265 - RNA, 146 nt, synthetic construct
  source 1..146: mol_type = other RNA; note = pegRNA
tttctctgcaggtgtcacacgttttagagctagaaatagcaagttaaaataaggctagtccgttatcaacttgaaaaagtggcaccgagtcggtgcagtgtgagtgcaaaaaagaagccaaaggattacagtgtgacacctgcaga

SEQ ID NO: 3266 - RNA, 146 nt, synthetic construct
  source 1..146: mol_type = other RNA; note = pegRNA
tttctctgcaggtgtcacacgttttagagctagaaatagcaagttaaaataaggctagtccgttatcaacttgaaaaagtggcaccgagtcggtgcagtgtgagtgcaaaaaagaagccaaaggattacagtgtgacacctgtttt

SEQ ID NO: 3267 - RNA, 146 nt, synthetic construct
  source 1..146: mol_type = other RNA; note = pegRNA
tttctctgcaggtgtcacacgttttagagctagaaatagcaagttaaaataaggctagtccgttatcaacttgaaaaagtggcaccgagtcggtgcagtgtgagtgcaaaaaagaagccaaaggattgcagtgtgacacctgcaga

SEQ ID NO: 3268 - RNA, 146 nt, synthetic construct
  source 1..146: mol_type = other RNA; note = pegRNA
tttctctgcaggtgtcacacgttttagagctagaaatagcaagttaaaataaggctagtccgttatcaacttgaaaaagtggcaccgagtcggtgcagtgtgagtgcaaaaaagaagccaaaggattgcagtgtgacacctgtttt

SEQ ID NO: 3269 - RNA, 146 nt, synthetic construct
  source 1..146: mol_type = other RNA; note = pegRNA
tttctctgcaggtgtcacacgttttagagctagaaatagcaagttaaaataaggctagtccgttatcaacttgaaaaagtggcaccgagtcggtgccagtgtgagtgcaaaaaagaagccaaaggactacagtgtgacacctgcag

SEQ ID NO: 3270 - RNA, 146 nt, synthetic construct
  source 1..146: mol_type = other RNA; note = pegRNA
tttctctgcaggtgtcacacgttttagagctagaaatagcaagttaaaataaggctagtccgttatcaacttgaaaaagtggcaccgagtcggtgccagtgtgagtgcaaaaaagaagccaaaggactacagtgtgacaccttttt

SEQ ID NO: 3271 - RNA, 146 nt, synthetic construct
  source 1..146: mol_type = other RNA; note = pegRNA
tttctctgcaggtgtcacacgttttagagctagaaatagcaagttaaaataaggctagtccgttatcaacttgaaaaagtggcaccgagtcggtgccagtgtgagtgcaaaaaagaagccaaaggactgcagtgtgacacctgcag

SEQ ID NO: 3272 - RNA, 146 nt, synthetic construct
  source 1..146: mol_type = other RNA; note = pegRNA
tttctctgcaggtgtcacacgttttagagctagaaatagcaagttaaaataaggctagtccgttatcaacttgaaaaagtggcaccgagtcggtgccagtgtgagtgcaaaaaagaagccaaaggactgcagtgtgacaccttttt

SEQ ID NO: 3273 - RNA, 146 nt, synthetic construct
  source 1..146: mol_type = other RNA; note = pegRNA
tttctctgcaggtgtcacacgttttagagctagaaatagcaagttaaaataaggctagtccgttatcaacttgaaaaagtggcaccgagtcggtgccagtgtgagtgcaaaaaagaagccaaaggattacagtgtgacacctgcag

SEQ ID NO: 3274 - RNA, 146 nt, synthetic construct
  source 1..146: mol_type = other RNA; note = pegRNA
tttctctgcaggtgtcacacgttttagagctagaaatagcaagttaaaataaggctagtccgttatcaacttgaaaaagtggcaccgagtcggtgccagtgtgagtgcaaaaaagaagccaaaggattacagtgtgacaccttttt

SEQ ID NO: 3275 - RNA, 146 nt, synthetic construct
  source 1..146: mol_type = other RNA; note = pegRNA
tttctctgcaggtgtcacacgttttagagctagaaatagcaagttaaaataaggctagtccgttatcaacttgaaaaagtggcaccgagtcggtgccagtgtgagtgcaaaaaagaagccaaaggattgcagtgtgacacctgcag

SEQ ID NO: 3276 - RNA, 146 nt, synthetic construct
  source 1..146: mol_type = other RNA; note = pegRNA
tttctctgcaggtgtcacacgttttagagctagaaatagcaagttaaaataaggctagtccgttatcaacttgaaaaagtggcaccgagtcggtgccagtgtgagtgcaaaaaagaagccaaaggattgcagtgtgacaccttttt

SEQ ID NO: 3277 - RNA, 146 nt, synthetic construct
  source 1..146: mol_type = other RNA; note = pegRNA
tttctctgcaggtgtcacacgttttagagctagaaatagcaagttaaaataaggctagtccgttatcaacttgaaaaagtggcaccgagtcggtgcgcagtgtgagtgcaaaaaagaagccaaaggactacagtgtgacacctgca

SEQ ID NO: 3278 - RNA, 146 nt, synthetic construct
  source 1..146: mol_type = other RNA; note = pegRNA
tttctctgcaggtgtcacacgttttagagctagaaatagcaagttaaaataaggctagtccgttatcaacttgaaaaagtggcaccgagtcggtgcgcagtgtgagtgcaaaaaagaagccaaaggactgcagtgtgacacctgca

SEQ ID NO: 3279 - RNA, 146 nt, synthetic construct
  source 1..146: mol_type = other RNA; note = pegRNA
tttctctgcaggtgtcacacgttttagagctagaaatagcaagttaaaataaggctagtccgttatcaacttgaaaaagtggcaccgagtcggtgcgcagtgtgagtgcaaaaaagaagccaaaggattacagtgtgacacctgca

SEQ ID NO: 3280 - RNA, 146 nt, synthetic construct
  source 1..146: mol_type = other RNA; note = pegRNA
tttctctgcaggtgtcacacgttttagagctagaaatagcaagttaaaataaggctagtccgttatcaacttgaaaaagtggcaccgagtcggtgcgcagtgtgagtgcaaaaaagaagccaaaggattgcagtgtgacacctgca

SEQ ID NO: 3281 - RNA, 146 nt, synthetic construct
  source 1..146: mol_type = other RNA; note = pegRNA
tttctctgcaggtgtcacacgttttagagctagaaatagcaagttaaaataaggctagtccgttatcaacttgaaaaagtggcaccgagtcggtgcggcagtgtgagtgcaaaaaagaagccaaaggactacagtgtgacacctgc

SEQ ID NO: 3282 - RNA, 146 nt, synthetic construct
  source 1..146: mol_type = other RNA; note = pegRNA
tttctctgcaggtgtcacacgttttagagctagaaatagcaagttaaaataaggctagtccgttatcaacttgaaaaagtggcaccgagtcggtgcggcagtgtgagtgcaaaaaagaagccaaaggactgcagtgtgacacctgc

SEQ ID NO: 3283 - RNA, 146 nt, synthetic construct
  source 1..146: mol_type = other RNA; note = pegRNA
tttctctgcaggtgtcacacgttttagagctagaaatagcaagttaaaataaggctagtccgttatcaacttgaaaaagtggcaccgagtcggtgcggcagtgtgagtgcaaaaaagaagccaaaggacttcagtgtgacacctgc

SEQ ID NO: 3284 - RNA, 146 nt, synthetic construct
  source 1..146: mol_type = other RNA; note = pegRNA
tttctctgcaggtgtcacacgttttagagctagaaatagcaagttaaaataaggctagtccgttatcaacttgaaaaagtggcaccgagtcggtgcggcagtgtgagtgcaaaaaagaagccaaaggattacagtgtgacacctgc

SEQ ID NO: 3285 - RNA, 146 nt, synthetic construct
  source 1..146: mol_type = other RNA; note = pegRNA
tttctctgcaggtgtcacacgttttagagctagaaatagcaagttaaaataaggctagtccgttatcaacttgaaaaagtggcaccgagtcggtgcggcagtgtgagtgcaaaaaagaagccaaaggattgcagtgtgacacctgc

SEQ ID NO: 3286 - RNA, 146 nt, synthetic construct
  source 1..146: mol_type = other RNA; note = pegRNA
tttctctgcaggtgtcacacgttttagagctagaaatagcaagttaaaataaggctagtccgttatcaacttgaaaaagtggcaccgagtcggtgcgtgtgagtgcaaaaaagaagccaaaggactacagtgtgacacctgcagag

SEQ ID NO: 3287 - RNA, 146 nt, synthetic construct
  source 1..146: mol_type = other RNA; note = pegRNA
tttctctgcaggtgtcacacgttttagagctagaaatagcaagttaaaataaggctagtccgttatcaacttgaaaaagtggcaccgagtcggtgcgtgtgagtgcaaaaaagaagccaaaggactacagtgtgacacctgctttt

SEQ ID NO: 3288 - RNA, 146 nt, synthetic construct
  source 1..146: mol_type = other RNA; note = pegRNA
tttctctgcaggtgtcacacgttttagagctagaaatagcaagttaaaataaggctagtccgttatcaacttgaaaaagtggcaccgagtcggtgcgtgtgagtgcaaaaaagaagccaaaggactgcagtgtgacacctgcagag

SEQ ID NO: 3289 - RNA, 146 nt, synthetic construct
  source 1..146: mol_type = other RNA; note = pegRNA
tttctctgcaggtgtcacacgttttagagctagaaatagcaagttaaaataaggctagtccgttatcaacttgaaaaagtggcaccgagtcggtgcgtgtgagtgcaaaaaagaagccaaaggactgcagtgtgacacctgctttt

SEQ ID NO: 3290 - RNA, 146 nt, synthetic construct
  source 1..146: mol_type = other RNA; note = pegRNA
tttctctgcaggtgtcacacgttttagagctagaaatagcaagttaaaataaggctagtccgttatcaacttgaaaaagtggcaccgagtcggtgcgtgtgagtgcaaaaaagaagccaaaggacttcagtgtgacacctgcagag

SEQ ID NO: 3291 - RNA, 146 nt, synthetic construct
  source 1..146: mol_type = other RNA; note = pegRNA
tttctctgcaggtgtcacacgttttagagctagaaatagcaagttaaaataaggctagtccgttatcaacttgaaaaagtggcaccgagtcggtgcgtgtgagtgcaaaaaagaagccaaaggacttcagtgtgacacctgctttt

SEQ ID NO: 3292 - RNA, 146 nt, synthetic construct
  source 1..146: mol_type = other RNA; note = pegRNA
tttctctgcaggtgtcacacgttttagagctagaaatagcaagttaaaataaggctagtccgttatcaacttgaaaaagtggcaccgagtcggtgcgtgtgagtgcaaaaaagaagccaaaggattacagtgtgacacctgcagag

SEQ ID NO: 3293 - RNA, 146 nt, synthetic construct
  source 1..146: mol_type = other RNA; note = pegRNA
tttctctgcaggtgtcacacgttttagagctagaaatagcaagttaaaataaggctagtccgttatcaacttgaaaaagtggcaccgagtcggtgcgtgtgagtgcaaaaaagaagccaaaggattacagtgtgacacctgctttt

SEQ ID NO: 3294 - RNA, 146 nt, synthetic construct
  source 1..146: mol_type = other RNA; note = pegRNA
tttctctgcaggtgtcacacgttttagagctagaaatagcaagttaaaataaggctagtccgttatcaacttgaaaaagtggcaccgagtcggtgcgtgtgagtgcaaaaaagaagccaaaggattgcagtgtgacacctgcagag

SEQ ID NO: 3295 - RNA, 146 nt, synthetic construct
  source 1..146: mol_type = other RNA; note = pegRNA
tttctctgcaggtgtcacacgttttagagctagaaatagcaagttaaaataaggctagtccgttatcaacttgaaaaagtggcaccgagtcggtgcgtgtgagtgcaaaaaagaagccaaaggattgcagtgtgacacctgctttt

SEQ ID NO: 3296 - RNA, 147 nt, synthetic construct
  source 1..147: mol_type = other RNA; note = pegRNA
tttctctgcaggtgtcacacgttttagagctagaaatagcaagttaaaataaggctagtccgttatcaacttgaaaaagtggcaccgagtcggtgcagtgtgagtgcaaaaaagaagccaaaggactacagtgtgacacctgcagag

SEQ ID NO: 3297 - RNA, 147 nt, synthetic construct
  source 1..147: mol_type = other RNA; note = pegRNA
tttctctgcaggtgtcacacgttttagagctagaaatagcaagttaaaataaggctagtccgttatcaacttgaaaaagtggcaccgagtcggtgcagtgtgagtgcaaaaaagaagccaaaggactacagtgtgacacctgctttt

SEQ ID NO: 3298 - RNA, 147 nt, synthetic construct
  source 1..147: mol_type = other RNA; note = pegRNA
tttctctgcaggtgtcacacgttttagagctagaaatagcaagttaaaataaggctagtccgttatcaacttgaaaaagtggcaccgagtcggtgcagtgtgagtgcaaaaaagaagccaaaggactgcagtgtgacacctgcagag

SEQ ID NO: 3299 - RNA, 147 nt, synthetic construct
  source 1..147: mol_type = other RNA; note = pegRNA
tttctctgcaggtgtcacacgttttagagctagaaatagcaagttaaaataaggctagtccgttatcaacttgaaaaagtggcaccgagtcggtgcagtgtgagtgcaaaaaagaagccaaaggactgcagtgtgacacctgctttt

SEQ ID NO: 3300 - RNA, 147 nt, synthetic construct
  source 1..147: mol_type = other RNA; note = pegRNA
tttctctgcaggtgtcacacgttttagagctagaaatagcaagttaaaataaggctagtccgttatcaacttgaaaaagtggcaccgagtcggtgcagtgtgagtgcaaaaaagaagccaaaggattacagtgtgacacctgcagag

SEQ ID NO: 3301 - RNA, 147 nt, synthetic construct
  source 1..147: mol_type = other RNA; note = pegRNA
tttctctgcaggtgtcacacgttttagagctagaaatagcaagttaaaataaggctagtccgttatcaacttgaaaaagtggcaccgagtcggtgcagtgtgagtgcaaaaaagaagccaaaggattacagtgtgacacctgctttt

SEQ ID NO: 3302 - RNA, 147 nt, synthetic construct
  source 1..147: mol_type = other RNA; note = pegRNA
tttctctgcaggtgtcacacgttttagagctagaaatagcaagttaaaataaggctagtccgttatcaacttgaaaaagtggcaccgagtcggtgcagtgtgagtgcaaaaaagaagccaaaggattgcagtgtgacacctgcagag

SEQ ID NO: 3303 - RNA, 147 nt, synthetic construct
  source 1..147: mol_type = other RNA; note = pegRNA
tttctctgcaggtgtcacacgttttagagctagaaatagcaagttaaaataaggctagtccgttatcaacttgaaaaagtggcaccgagtcggtgcagtgtgagtgcaaaaaagaagccaaaggattgcagtgtgacacctgctttt

SEQ ID NO: 3304 - RNA, 147 nt, synthetic construct
  source 1..147: mol_type = other RNA; note = pegRNA
tttctctgcaggtgtcacacgttttagagctagaaatagcaagttaaaataaggctagtccgttatcaacttgaaaaagtggcaccgagtcggtgccagtgtgagtgcaaaaaagaagccaaaggactacagtgtgacacctgcaga

SEQ ID NO: 3305 - RNA, 147 nt, synthetic construct
  source 1..147: mol_type = other RNA; note = pegRNA
tttctctgcaggtgtcacacgttttagagctagaaatagcaagttaaaataaggctagtccgttatcaacttgaaaaagtggcaccgagtcggtgccagtgtgagtgcaaaaaagaagccaaaggactacagtgtgacacctgtttt

SEQ ID NO: 3306 - RNA, 147 nt, synthetic construct
  source 1..147: mol_type = other RNA; note = pegRNA
tttctctgcaggtgtcacacgttttagagctagaaatagcaagttaaaataaggctagtccgttatcaacttgaaaaagtggcaccgagtcggtgccagtgtgagtgcaaaaaagaagccaaaggactgcagtgtgacacctgcaga

SEQ ID NO: 3307 - RNA, 147 nt, synthetic construct
  source 1..147: mol_type = other RNA; note = pegRNA
tttctctgcaggtgtcacacgttttagagctagaaatagcaagttaaaataaggctagtccgttatcaacttgaaaaagtggcaccgagtcggtgccagtgtgagtgcaaaaaagaagccaaaggactgcagtgtgacacctgtttt

SEQ ID NO: 3308 - RNA, 147 nt, synthetic construct
  source 1..147: mol_type = other RNA; note = pegRNA
tttctctgcaggtgtcacacgttttagagctagaaatagcaagttaaaataaggctagtccgttatcaacttgaaaaagtggcaccgagtcggtgccagtgtgagtgcaaaaaagaagccaaaggattacagtgtgacacctgcaga

SEQ ID NO: 3309 - RNA, 147 nt, synthetic construct
  source 1..147: mol_type = other RNA; note = pegRNA
tttctctgcaggtgtcacacgttttagagctagaaatagcaagttaaaataaggctagtccgttatcaacttgaaaaagtggcaccgagtcggtgccagtgtgagtgcaaaaaagaagccaaaggattacagtgtgacacctgtttt

SEQ ID NO: 3310 - RNA, 147 nt, synthetic construct
  source 1..147: mol_type = other RNA; note = pegRNA
tttctctgcaggtgtcacacgttttagagctagaaatagcaagttaaaataaggctagtccgttatcaacttgaaaaagtggcaccgagtcggtgccagtgtgagtgcaaaaaagaagccaaaggattgcagtgtgacacctgcaga

SEQ ID NO: 3311 - RNA, 147 nt, synthetic construct
  source 1..147: mol_type = other RNA; note = pegRNA
tttctctgcaggtgtcacacgttttagagctagaaatagcaagttaaaataaggctagtccgttatcaacttgaaaaagtggcaccgagtcggtgccagtgtgagtgcaaaaaagaagccaaaggattgcagtgtgacacctgtttt

SEQ ID NO: 3312 - RNA, 147 nt, synthetic construct
  source 1..147: mol_type = other RNA; note = pegRNA
tttctctgcaggtgtcacacgttttagagctagaaatagcaagttaaaataaggctagtccgttatcaacttgaaaaagtggcaccgagtcggtgcgcagtgtgagtgcaaaaaagaagccaaaggactacagtgtgacacctgcag

SEQ ID NO: 3313 - RNA, 147 nt, synthetic construct
  source 1..147: mol_type = other RNA; note = pegRNA
tttctctgcaggtgtcacacgttttagagctagaaatagcaagttaaaataaggctagtccgttatcaacttgaaaaagtggcaccgagtcggtgcgcagtgtgagtgcaaaaaagaagccaaaggactacagtgtgacaccttttt

SEQ ID NO: 3314 - RNA, 147 nt, synthetic construct
  source 1..147: mol_type = other RNA; note = pegRNA
tttctctgcaggtgtcacacgttttagagctagaaatagcaagttaaaataaggctagtccgttatcaacttgaaaaagtggcaccgagtcggtgcgcagtgtgagtgcaaaaaagaagccaaaggactgcagtgtgacacctgcag

SEQ ID NO: 3315 - RNA, 147 nt, synthetic construct
  source 1..147: mol_type = other RNA; note = pegRNA
tttctctgcaggtgtcacacgttttagagctagaaatagcaagttaaaataaggctagtccgttatcaacttgaaaaagtggcaccgagtcggtgcgcagtgtgagtgcaaaaaagaagccaaaggactgcagtgtgacaccttttt

SEQ ID NO: 3316 - RNA, 147 nt, synthetic construct
  source 1..147: mol_type = other RNA; note = pegRNA
tttctctgcaggtgtcacacgttttagagctagaaatagcaagttaaaataaggctagtccgttatcaacttgaaaaagtggcaccgagtcggtgcgcagtgtgagtgcaaaaaagaagccaaaggacttcagtgtgacacctgcag

SEQ ID NO: 3317 - RNA, 147 nt, synthetic construct
  source 1..147: mol_type = other RNA; note = pegRNA
tttctctgcaggtgtcacacgttttagagctagaaatagcaagttaaaataaggctagtccgttatcaacttgaaaaagtggcaccgagtcggtgcgcagtgtgagtgcaaaaaagaagccaaaggacttcagtgtgacaccttttt

SEQ ID NO: 3318 - RNA, 147 nt, synthetic construct
  source 1..147: mol_type = other RNA; note = pegRNA
tttctctgcaggtgtcacacgttttagagctagaaatagcaagttaaaataaggctagtccgttatcaacttgaaaaagtggcaccgagtcggtgcgcagtgtgagtgcaaaaaagaagccaaaggattacagtgtgacacctgcag

SEQ ID NO: 3319 - RNA, 147 nt, synthetic construct
  source 1..147: mol_type = other RNA; note = pegRNA
tttctctgcaggtgtcacacgttttagagctagaaatagcaagttaaaataaggctagtccgttatcaacttgaaaaagtggcaccgagtcggtgcgcagtgtgagtgcaaaaaagaagccaaaggattacagtgtgacaccttttt

SEQ ID NO: 3320 - RNA, 147 nt, synthetic construct
  source 1..147: mol_type = other RNA; note = pegRNA
tttctctgcaggtgtcacacgttttagagctagaaatagcaagttaaaataaggctagtccgttatcaacttgaaaaagtggcaccgagtcggtgcgcagtgtgagtgcaaaaaagaagccaaaggattgcagtgtgacacctgcag

SEQ ID NO: 3321 - RNA, 147 nt, synthetic construct
  source 1..147: mol_type = other RNA; note = pegRNA
tttctctgcaggtgtcacacgttttagagctagaaatagcaagttaaaataaggctagtccgttatcaacttgaaaaagtggcaccgagtcggtgcgcagtgtgagtgcaaaaaagaagccaaaggattgcagtgtgacaccttttt

SEQ ID NO: 3322 - RNA, 147 nt, synthetic construct
  source 1..147: mol_type = other RNA; note = pegRNA
tttctctgcaggtgtcacacgttttagagctagaaatagcaagttaaaataaggctagtccgttatcaacttgaaaaagtggcaccgagtcggtgcggcagtgtgagtgcaaaaaagaagccaaaggactacagtgtgacacctgca

SEQ ID NO: 3323 - RNA, 147 nt, synthetic construct
  source 1..147: mol_type = other RNA; note = pegRNA
tttctctgcaggtgtcacacgttttagagctagaaatagcaagttaaaataaggctagtccgttatcaacttgaaaaagtggcaccgagtcggtgcggcagtgtgagtgcaaaaaagaagccaaaggactgcagtgtgacacctgca

SEQ ID NO: 3324 - RNA, 147 nt, synthetic construct
  source 1..147: mol_type = other RNA; note = pegRNA
tttctctgcaggtgtcacacgttttagagctagaaatagcaagttaaaataaggctagtccgttatcaacttgaaaaagtggcaccgagtcggtgcggcagtgtgagtgcaaaaaagaagccaaaggattacagtgtgacacctgca

SEQ ID NO: 3325 - RNA, 147 nt, synthetic construct
  source 1..147: mol_type = other RNA; note = pegRNA
tttctctgcaggtgtcacacgttttagagctagaaatagcaagttaaaataaggctagtccgttatcaacttgaaaaagtggcaccgagtcggtgcggcagtgtgagtgcaaaaaagaagccaaaggattgcagtgtgacacctgca

SEQ ID NO: 3326 - RNA, 147 nt, synthetic construct
  source 1..147: mol_type = other RNA; note = pegRNA
tttctctgcaggtgtcacacgttttagagctagaaatagcaagttaaaataaggctagtccgttatcaacttgaaaaagtggcaccgagtcggtgcgtgtgagtgcaaaaaagaagccaaaggactacagtgtgacacctgcagaga

SEQ ID NO: 3327 - RNA, 147 nt, synthetic construct
  source 1..147: mol_type = other RNA; note = pegRNA
tttctctgcaggtgtcacacgttttagagctagaaatagcaagttaaaataaggctagtccgttatcaacttgaaaaagtggcaccgagtcggtgcgtgtgagtgcaaaaaagaagccaaaggactacagtgtgacacctgcatttt

SEQ ID NO: 3328 - RNA, 147 nt, synthetic construct
  source 1..147: mol_type = other RNA; note = pegRNA
tttctctgcaggtgtcacacgttttagagctagaaatagcaagttaaaataaggctagtccgttatcaacttgaaaaagtggcaccgagtcggtgcgtgtgagtgcaaaaaagaagccaaaggactgcagtgtgacacctgcagaga

SEQ ID NO: 3329 - RNA, 147 nt, synthetic construct
  source 1..147: mol_type = other RNA; note = pegRNA
tttctctgcaggtgtcacacgttttagagctagaaatagcaagttaaaataaggctagtccgttatcaacttgaaaaagtggcaccgagtcggtgcgtgtgagtgcaaaaaagaagccaaaggactgcagtgtgacacctgcatttt

SEQ ID NO: 3330 - RNA, 147 nt, synthetic construct
  source 1..147: mol_type = other RNA; note = pegRNA
tttctctgcaggtgtcacacgttttagagctagaaatagcaagttaaaataaggctagtccgttatcaacttgaaaaagtggcaccgagtcggtgcgtgtgagtgcaaaaaagaagccaaaggattacagtgtgacacctgcagaga

SEQ ID NO: 3331 - RNA, 147 nt, synthetic construct
  source 1..147: mol_type = other RNA; note = pegRNA
tttctctgcaggtgtcacacgttttagagctagaaatagcaagttaaaataaggctagtccgttatcaacttgaaaaagtggcaccgagtcggtgcgtgtgagtgcaaaaaagaagccaaaggattacagtgtgacacctgcatttt

SEQ ID NO: 3332 - RNA, 147 nt, synthetic construct
  source 1..147: mol_type = other RNA; note = pegRNA
tttctctgcaggtgtcacacgttttagagctagaaatagcaagttaaaataaggctagtccgttatcaacttgaaaaagtggcaccgagtcggtgcgtgtgagtgcaaaaaagaagccaaaggattgcagtgtgacacctgcagaga

SEQ ID NO: 3333 - RNA, 147 nt, synthetic construct
  source 1..147: mol_type = other RNA; note = pegRNA
tttctctgcaggtgtcacacgttttagagctagaaatagcaagttaaaataaggctagtccgttatcaacttgaaaaagtggcaccgagtcggtgcgtgtgagtgcaaaaaagaagccaaaggattgcagtgtgacacctgcatttt

SEQ ID NO: 3334 - RNA, 148 nt, synthetic construct
  source 1..148: mol_type = other RNA; note = pegRNA
tttctctgcaggtgtcacacgttttagagctagaaatagcaagttaaaataaggctagtccgttatcaacttgaaaaagtggcaccgagtcggtgcagtgtgagtgcaaaaaagaagccaaaggactacagtgtgacacctgcagaga

SEQ ID NO: 3335 - RNA, 148 nt, synthetic construct
  source 1..148: mol_type = other RNA; note = pegRNA
tttctctgcaggtgtcacacgttttagagctagaaatagcaagttaaaataaggctagtccgttatcaacttgaaaaagtggcaccgagtcggtgcagtgtgagtgcaaaaaagaagccaaaggactacagtgtgacacctgcatttt

SEQ ID NO: 3336 - RNA, 148 nt, synthetic construct
  source 1..148: mol_type = other RNA; note = pegRNA
tttctctgcaggtgtcacacgttttagagctagaaatagcaagttaaaataaggctagtccgttatcaacttgaaaaagtggcaccgagtcggtgcagtgtgagtgcaaaaaagaagccaaaggactgcagtgtgacacctgcagaga

SEQ ID NO: 3337 - RNA, 148 nt, synthetic construct
  source 1..148: mol_type = other RNA; note = pegRNA
tttctctgcaggtgtcacacgttttagagctagaaatagcaagttaaaataaggctagtccgttatcaacttgaaaaagtggcaccgagtcggtgcagtgtgagtgcaaaaaagaagccaaaggactgcagtgtgacacctgcatttt

SEQ ID NO: 3338 - RNA, 148 nt, synthetic construct
  source 1..148: mol_type = other RNA; note = pegRNA
tttctctgcaggtgtcacacgttttagagctagaaatagcaagttaaaataaggctagtccgttatcaacttgaaaaagtggcaccgagtcggtgcagtgtgagtgcaaaaaagaagccaaaggattacagtgtgacacctgcagaga

SEQ ID NO: 3339 - RNA, 148 nt, synthetic construct
  source 1..148: mol_type = other RNA; note = pegRNA
tttctctgcaggtgtcacacgttttagagctagaaatagcaagttaaaataaggctagtccgttatcaacttgaaaaagtggcaccgagtcggtgcagtgtgagtgcaaaaaagaagccaaaggattacagtgtgacacctgcatttt

SEQ ID NO: 3340 - RNA, 148 nt, synthetic construct
  source 1..148: mol_type = other RNA; note = pegRNA
tttctctgcaggtgtcacacgttttagagctagaaatagcaagttaaaataaggctagtccgttatcaacttgaaaaagtggcaccgagtcggtgcagtgtgagtgcaaaaaagaagccaaaggattgcagtgtgacacctgcagaga

SEQ ID NO: 3341 - RNA, 148 nt, synthetic construct
  source 1..148: mol_type = other RNA; note = pegRNA
tttctctgcaggtgtcacacgttttagagctagaaatagcaagttaaaataaggctagtccgttatcaacttgaaaaagtggcaccgagtcggtgcagtgtgagtgcaaaaaagaagccaaaggattgcagtgtgacacctgcatttt

SEQ ID NO: 3342 - RNA, 148 nt, synthetic construct
  source 1..148: mol_type = other RNA; note = pegRNA
tttctctgcaggtgtcacacgttttagagctagaaatagcaagttaaaataaggctagtccgttatcaacttgaaaaagtggcaccgagtcggtgccagtgtgagtgcaaaaaagaagccaaaggactacagtgtgacacctgcagag

SEQ ID NO: 3343 - RNA, 148 nt, synthetic construct
  source 1..148: mol_type = other RNA; note = pegRNA
tttctctgcaggtgtcacacgttttagagctagaaatagcaagttaaaataaggctagtccgttatcaacttgaaaaagtggcaccgagtcggtgccagtgtgagtgcaaaaaagaagccaaaggactacagtgtgacacctgctttt

SEQ ID NO: 3344 - RNA, 148 nt, synthetic construct
  source 1..148: mol_type = other RNA; note = pegRNA
tttctctgcaggtgtcacacgttttagagctagaaatagcaagttaaaataaggctagtccgttatcaacttgaaaaagtggcaccgagtcggtgccagtgtgagtgcaaaaaagaagccaaaggactgcagtgtgacacctgcagag

SEQ ID NO: 3345 - RNA, 148 nt, synthetic construct
  source 1..148: mol_type = other RNA; note = pegRNA
tttctctgcaggtgtcacacgttttagagctagaaatagcaagttaaaataaggctagtccgttatcaacttgaaaaagtggcaccgagtcggtgccagtgtgagtgcaaaaaagaagccaaaggactgcagtgtgacacctgctttt

SEQ ID NO: 3346 - RNA, 148 nt, synthetic construct
  source 1..148: mol_type = other RNA; note = pegRNA
tttctctgcaggtgtcacacgttttagagctagaaatagcaagttaaaataaggctagtccgttatcaacttgaaaaagtggcaccgagtcggtgccagtgtgagtgcaaaaaagaagccaaaggattacagtgtgacacctgcagag

SEQ ID NO: 3347 - RNA, 148 nt, synthetic construct
  source 1..148: mol_type = other RNA; note = pegRNA
tttctctgcaggtgtcacacgttttagagctagaaatagcaagttaaaataaggctagtccgttatcaacttgaaaaagtggcaccgagtcggtgccagtgtgagtgcaaaaaagaagccaaaggattacagtgtgacacctgctttt

SEQ ID NO: 3348 - RNA, 148 nt, synthetic construct
  source 1..148: mol_type = other RNA; note = pegRNA
tttctctgcaggtgtcacacgttttagagctagaaatagcaagttaaaataaggctagtccgttatcaacttgaaaaagtggcaccgagtcggtgccagtgtgagtgcaaaaaagaagccaaaggattgcagtgtgacacctgcagag

SEQ ID NO: 3349 - RNA, 148 nt, synthetic construct
  source 1..148: mol_type = other RNA; note = pegRNA
tttctctgcaggtgtcacacgttttagagctagaaatagcaagttaaaataaggctagtccgttatcaacttgaaaaagtggcaccgagtcggtgccagtgtgagtgcaaaaaagaagccaaaggattgcagtgtgacacctgctttt

SEQ ID NO: 3350 - RNA, 148 nt, synthetic construct
  source 1..148: mol_type = other RNA; note = pegRNA
tttctctgcaggtgtcacacgttttagagctagaaatagcaagttaaaataaggctagtccgttatcaacttgaaaaagtggcaccgagtcggtgcgcagtgtgagtgcaaaaaagaagccaaaggactacagtgtgacacctgcaga

SEQ ID NO: 3351 - RNA, 148 nt, synthetic construct
  source 1..148: mol_type = other RNA; note = pegRNA
tttctctgcaggtgtcacacgttttagagctagaaatagcaagttaaaataaggctagtccgttatcaacttgaaaaagtggcaccgagtcggtgcgcagtgtgagtgcaaaaaagaagccaaaggactacagtgtgacacctgtttt

SEQ ID NO: 3352 - RNA, 148 nt, synthetic construct
  source 1..148: mol_type = other RNA; note = pegRNA
tttctctgcaggtgtcacacgttttagagctagaaatagcaagttaaaataaggctagtccgttatcaacttgaaaaagtggcaccgagtcggtgcgcagtgtgagtgcaaaaaagaagccaaaggactgcagtgtgacacctgcaga

SEQ ID NO: 3353 - RNA, 148 nt, synthetic construct
  source 1..148: mol_type = other RNA; note = pegRNA
tttctctgcaggtgtcacacgttttagagctagaaatagcaagttaaaataaggctagtccgttatcaacttgaaaaagtggcaccgagtcggtgcgcagtgtgagtgcaaaaaagaagccaaaggactgcagtgtgacacctgtttt

SEQ ID NO: 3354 - RNA, 148 nt, synthetic construct
  source 1..148: mol_type = other RNA; note = pegRNA
tttctctgcaggtgtcacacgttttagagctagaaatagcaagttaaaataaggctagtccgttatcaacttgaaaaagtggcaccgagtcggtgcgcagtgtgagtgcaaaaaagaagccaaaggattacagtgtgacacctgcaga

SEQ ID NO: 3355 - RNA, 148 nt, synthetic construct
  source 1..148: mol_type = other RNA; note = pegRNA
tttctctgcaggtgtcacacgttttagagctagaaatagcaagttaaaataaggctagtccgttatcaacttgaaaaagtggcaccgagtcggtgcgcagtgtgagtgcaaaaaagaagccaaaggattacagtgtgacacctgtttt

SEQ ID NO: 3356 - RNA, 148 nt, synthetic construct
  source 1..148: mol_type = other RNA; note = pegRNA
tttctctgcaggtgtcacacgttttagagctagaaatagcaagttaaaataaggctagtccgttatcaacttgaaaaagtggcaccgagtcggtgcgcagtgtgagtgcaaaaaagaagccaaaggattgcagtgtgacacctgcaga

SEQ ID NO: 3357 - RNA, 148 nt, synthetic construct
  source 1..148: mol_type = other RNA; note = pegRNA
tttctctgcaggtgtcacacgttttagagctagaaatagcaagttaaaataaggctagtccgttatcaacttgaaaaagtggcaccgagtcggtgcgcagtgtgagtgcaaaaaagaagccaaaggattgcagtgtgacacctgtttt

SEQ ID NO: 3358 - RNA, 148 nt, synthetic construct
  source 1..148: mol_type = other RNA; note = pegRNA
tttctctgcaggtgtcacacgttttagagctagaaatagcaagttaaaataaggctagtccgttatcaacttgaaaaagtggcaccgagtcggtgcggcagtgtgagtgcaaaaaagaagccaaaggactacagtgtgacacctgcag

SEQ ID NO: 3359 - RNA, 148 nt, synthetic construct
  source 1..148: mol_type = other RNA; note = pegRNA
tttctctgcaggtgtcacacgttttagagctagaaatagcaagttaaaataaggctagtccgttatcaacttgaaaaagtggcaccgagtcggtgcggcagtgtgagtgcaaaaaagaagccaaaggactacagtgtgacaccttttt

SEQ ID NO: 3360 - RNA, 148 nt, synthetic construct
  source 1..148: mol_type = other RNA; note = pegRNA
tttctctgcaggtgtcacacgttttagagctagaaatagcaagttaaaataaggctagtccgttatcaacttgaaaaagtggcaccgagtcggtgcggcagtgtgagtgcaaaaaagaagccaaaggactgcagtgtgacacctgcag

SEQ ID NO: 3361 - RNA, 148 nt, synthetic construct
  source 1..148: mol_type = other RNA; note = pegRNA
tttctctgcaggtgtcacacgttttagagctagaaatagcaagttaaaataaggctagtccgttatcaacttgaaaaagtggcaccgagtcggtgcggcagtgtgagtgcaaaaaagaagccaaaggactgcagtgtgacaccttttt

SEQ ID NO: 3362 - RNA, 148 nt, synthetic construct
  source 1..148: mol_type = other RNA; note = pegRNA
tttctctgcaggtgtcacacgttttagagctagaaatagcaagttaaaataaggctagtccgttatcaacttgaaaaagtggcaccgagtcggtgcggcagtgtgagtgcaaaaaagaagccaaaggacttcagtgtgacacctgcag

SEQ ID NO: 3363 - RNA, 148 nt, synthetic construct
  source 1..148: mol_type = other RNA; note = pegRNA
tttctctgcaggtgtcacacgttttagagctagaaatagcaagttaaaataaggctagtccgttatcaacttgaaaaagtggcaccgagtcggtgcggcagtgtgagtgcaaaaaagaagccaaaggacttcagtgtgacaccttttt

SEQ ID NO: 3364 - RNA, 148 nt, synthetic construct
  source 1..148: mol_type = other RNA; note = pegRNA
tttctctgcaggtgtcacacgttttagagctagaaatagcaagttaaaataaggctagtccgttatcaacttgaaaaagtggcaccgagtcggtgcggcagtgtgagtgcaaaaaagaagccaaaggattacagtgtgacacctgcag

SEQ ID NO: 3365 - RNA, 148 nt, synthetic construct
  source 1..148: mol_type = other RNA; note = pegRNA
tttctctgcaggtgtcacacgttttagagctagaaatagcaagttaaaataaggctagtccgttatcaacttgaaaaagtggcaccgagtcggtgcggcagtgtgagtgcaaaaaagaagccaaaggattacagtgtgacaccttttt

SEQ ID NO: 3366 - RNA, 148 nt, synthetic construct
  source 1..148: mol_type = other RNA; note = pegRNA
tttctctgcaggtgtcacacgttttagagctagaaatagcaagttaaaataaggctagtccgttatcaacttgaaaaagtggcaccgagtcggtgcggcagtgtgagtgcaaaaaagaagccaaaggattgcagtgtgacacctgcag

SEQ ID NO: 3367 - RNA, 148 nt, synthetic construct
  source 1..148: mol_type = other RNA; note = pegRNA
tttctctgcaggtgtcacacgttttagagctagaaatagcaagttaaaataaggctagtccgttatcaacttgaaaaagtggcaccgagtcggtgcggcagtgtgagtgcaaaaaagaagccaaaggattgcagtgtgacaccttttt

SEQ ID NO: 3368 - RNA, 148 nt, synthetic construct
  source 1..148: mol_type = other RNA; note = pegRNA
tttctctgcaggtgtcacacgttttagagctagaaatagcaagttaaaataaggctagtccgttatcaacttgaaaaagtggcaccgagtcggtgcgtgtgagtgcaaaaaagaagccaaaggactacagtgtgacacctgcagagaa

SEQ ID NO: 3369 - RNA, 148 nt, synthetic construct
  source 1..148: mol_type = other RNA; note = pegRNA
tttctctgcaggtgtcacacgttttagagctagaaatagcaagttaaaataaggctagtccgttatcaacttgaaaaagtggcaccgagtcggtgcgtgtgagtgcaaaaaagaagccaaaggactacagtgtgacacctgcagtttt

SEQ ID NO: 3370 - RNA, 148 nt, synthetic construct
  source 1..148: mol_type = other RNA; note = pegRNA
tttctctgcaggtgtcacacgttttagagctagaaatagcaagttaaaataaggctagtccgttatcaacttgaaaaagtggcaccgagtcggtgcgtgtgagtgcaaaaaagaagccaaaggactgcagtgtgacacctgcagagaa

SEQ ID NO: 3371 - RNA, 148 nt, synthetic construct
  source 1..148: mol_type = other RNA; note = pegRNA
tttctctgcaggtgtcacacgttttagagctagaaatagcaagttaaaataaggctagtccgttatcaacttgaaaaagtggcaccgagtcggtgcgtgtgagtgcaaaaaagaagccaaaggactgcagtgtgacacctgcagtttt

SEQ ID NO: 3372 - RNA, 148 nt, synthetic construct
  source 1..148: mol_type = other RNA; note = pegRNA
tttctctgcaggtgtcacacgttttagagctagaaatagcaagttaaaataaggctagtccgttatcaacttgaaaaagtggcaccgagtcggtgcgtgtgagtgcaaaaaagaagccaaaggacttcagtgtgacacctgcagtttt

SEQ ID NO: 3373 - RNA, 148 nt, synthetic construct
  source 1..148: mol_type = other RNA; note = pegRNA
tttctctgcaggtgtcacacgttttagagctagaaatagcaagttaaaataaggctagtccgttatcaacttgaaaaagtggcaccgagtcggtgcgtgtgagtgcaaaaaagaagccaaaggattacagtgtgacacctgcagagaa

SEQ ID NO: 3374 - RNA, 148 nt, synthetic construct
  source 1..148: mol_type = other RNA; note = pegRNA
tttctctgcaggtgtcacacgttttagagctagaaatagcaagttaaaataaggctagtccgttatcaacttgaaaaagtggcaccgagtcggtgcgtgtgagtgcaaaaaagaagccaaaggattacagtgtgacacctgcagtttt

SEQ ID NO: 3375 - RNA, 148 nt, synthetic construct
  source 1..148: mol_type = other RNA; note = pegRNA
tttctctgcaggtgtcacacgttttagagctagaaatagcaagttaaaataaggctagtccgttatcaacttgaaaaagtggcaccgagtcggtgcgtgtgagtgcaaaaaagaagccaaaggattgcagtgtgacacctgcagagaa

SEQ ID NO: 3376 - RNA, 148 nt, synthetic construct
  source 1..148: mol_type = other RNA; note = pegRNA
tttctctgcaggtgtcacacgttttagagctagaaatagcaagttaaaataaggctagtccgttatcaacttgaaaaagtggcaccgagtcggtgcgtgtgagtgcaaaaaagaagccaaaggattgcagtgtgacacctgcagtttt

SEQ ID NO: 3377 - RNA, 149 nt, synthetic construct
  source 1..149: mol_type = other RNA; note = pegRNA
tttctctgcaggtgtcacacgttttagagctagaaatagcaagttaaaataaggctagtccgttatcaacttgaaaaagtggcaccgagtcggtgcagtgtgagtgcaaaaaagaagccaaaggactacagtgtgacacctgcagagaa

SEQ ID NO: 3378 - RNA, 149 nt, synthetic construct
  source 1..149: mol_type = other RNA; note = pegRNA
tttctctgcaggtgtcacacgttttagagctagaaatagcaagttaaaataaggctagtccgttatcaacttgaaaaagtggcaccgagtcggtgcagtgtgagtgcaaaaaagaagccaaaggactacagtgtgacacctgcagtttt

SEQ ID NO: 3379 - RNA, 149 nt, synthetic construct
  source 1..149: mol_type = other RNA; note = pegRNA
tttctctgcaggtgtcacacgttttagagctagaaatagcaagttaaaataaggctagtccgttatcaacttgaaaaagtggcaccgagtcggtgcagtgtgagtgcaaaaaagaagccaaaggactgcagtgtgacacctgcagagaa

SEQ ID NO: 3380 - RNA, 149 nt, synthetic construct
  source 1..149: mol_type = other RNA; note = pegRNA
tttctctgcaggtgtcacacgttttagagctagaaatagcaagttaaaataaggctagtccgttatcaacttgaaaaagtggcaccgagtcggtgcagtgtgagtgcaaaaaagaagccaaaggactgcagtgtgacacctgcagtttt

SEQ ID NO: 3381 - RNA, 149 nt, synthetic construct
  source 1..149: mol_type = other RNA; note = pegRNA
tttctctgcaggtgtcacacgttttagagctagaaatagcaagttaaaataaggctagtccgttatcaacttgaaaaagtggcaccgagtcggtgcagtgtgagtgcaaaaaagaagccaaaggattacagtgtgacacctgcagagaa

SEQ ID NO: 3382 - RNA, 149 nt, synthetic construct
  source 1..149: mol_type = other RNA; note = pegRNA
tttctctgcaggtgtcacacgttttagagctagaaatagcaagttaaaataaggctagtccgttatcaacttgaaaaagtggcaccgagtcggtgcagtgtgagtgcaaaaaagaagccaaaggattacagtgtgacacctgcagtttt

SEQ ID NO: 3383 - RNA, 149 nt, synthetic construct
  source 1..149: mol_type = other RNA; note = pegRNA
tttctctgcaggtgtcacacgttttagagctagaaatagcaagttaaaataaggctagtccgttatcaacttgaaaaagtggcaccgagtcggtgcagtgtgagtgcaaaaaagaagccaaaggattgcagtgtgacacctgcagagaa

SEQ ID NO: 3384 - RNA, 149 nt, synthetic construct
  source 1..149: mol_type = other RNA; note = pegRNA
tttctctgcaggtgtcacacgttttagagctagaaatagcaagttaaaataaggctagtccgttatcaacttgaaaaagtggcaccgagtcggtgcagtgtgagtgcaaaaaagaagccaaaggattgcagtgtgacacctgcagtttt

SEQ ID NO: 3385 - RNA, 149 nt, synthetic construct
  source 1..149: mol_type = other RNA; note = pegRNA
tttctctgcaggtgtcacacgttttagagctagaaatagcaagttaaaataaggctagtccgttatcaacttgaaaaagtggcaccgagtcggtgccagtgtgagtgcaaaaaagaagccaaaggactacagtgtgacacctgcagaga

SEQ ID NO: 3386 - RNA, 149 nt, synthetic construct
  source 1..149: mol_type = other RNA; note = pegRNA
tttctctgcaggtgtcacacgttttagagctagaaatagcaagttaaaataaggctagtccgttatcaacttgaaaaagtggcaccgagtcggtgccagtgtgagtgcaaaaaagaagccaaaggactacagtgtgacacctgcatttt

SEQ ID NO: 3387 - RNA, 149 nt, synthetic construct
  source 1..149: mol_type = other RNA; note = pegRNA
tttctctgcaggtgtcacacgttttagagctagaaatagcaagttaaaataaggctagtccgttatcaacttgaaaaagtggcaccgagtcggtgccagtgtgagtgcaaaaaagaagccaaaggactgcagtgtgacacctgcagaga

SEQ ID NO: 3388 - RNA, 149 nt, synthetic construct
  source 1..149: mol_type = other RNA; note = pegRNA
tttctctgcaggtgtcacacgttttagagctagaaatagcaagttaaaataaggctagtccgttatcaacttgaaaaagtggcaccgagtcggtgccagtgtgagtgcaaaaaagaagccaaaggactgcagtgtgacacctgcatttt

SEQ ID NO: 3389 - RNA, 149 nt, synthetic construct
  source 1..149: mol_type = other RNA; note = pegRNA
tttctctgcaggtgtcacacgttttagagctagaaatagcaagttaaaataaggctagtccgttatcaacttgaaaaagtggcaccgagtcggtgccagtgtgagtgcaaaaaagaagccaaaggattacagtgtgacacctgcagaga

SEQ ID NO: 3390 - RNA, 149 nt, synthetic construct
  source 1..149: mol_type = other RNA; note = pegRNA
tttctctgcaggtgtcacacgttttagagctagaaatagcaagttaaaataaggctagtccgttatcaacttgaaaaagtggcaccgagtcggtgccagtgtgagtgcaaaaaagaagccaaaggattacagtgtgacacctgcatttt

SEQ ID NO: 3391 - RNA, 149 nt, synthetic construct
  source 1..149: mol_type = other RNA; note = pegRNA
tttctctgcaggtgtcacacgttttagagctagaaatagcaagttaaaataaggctagtccgttatcaacttgaaaaagtggcaccgagtcggtgccagtgtgagtgcaaaaaagaagccaaaggattgcagtgtgacacctgcagaga

SEQ ID NO: 3392 - RNA, 149 nt, synthetic construct
  source 1..149: mol_type = other RNA; note = pegRNA
tttctctgcaggtgtcacacgttttagagctagaaatagcaagttaaaataaggctagtccgttatcaacttgaaaaagtggcaccgagtcggtgccagtgtgagtgcaaaaaagaagccaaaggattgcagtgtgacacctgcatttt

SEQ ID NO: 3393 - RNA, 149 nt, synthetic construct
  source 1..149: mol_type = other RNA; note = pegRNA
tttctctgcaggtgtcacacgttttagagctagaaatagcaagttaaaataaggctagtccgttatcaacttgaaaaagtggcaccgagtcggtgcgcagtgtgagtgcaaaaaagaagccaaaggactacagtgtgacacctgcagag

SEQ ID NO: 3394 - RNA, 149 nt, synthetic construct
  source 1..149: mol_type = other RNA; note = pegRNA
tttctctgcaggtgtcacacgttttagagctagaaatagcaagttaaaataaggctagtccgttatcaacttgaaaaagtggcaccgagtcggtgcgcagtgtgagtgcaaaaaagaagccaaaggactacagtgtgacacctgctttt

SEQ ID NO: 3395 - RNA, 149 nt, synthetic construct
  source 1..149: mol_type = other RNA; note = pegRNA
tttctctgcaggtgtcacacgttttagagctagaaatagcaagttaaaataaggctagtccgttatcaacttgaaaaagtggcaccgagtcggtgcgcagtgtgagtgcaaaaaagaagccaaaggactgcagtgtgacacctgcagag

SEQ ID NO: 3396 - RNA, 149 nt, synthetic construct
  source 1..149: mol_type = other RNA; note = pegRNA
tttctctgcaggtgtcacacgttttagagctagaaatagcaagttaaaataaggctagtccgttatcaacttgaaaaagtggcaccgagtcggtgcgcagtgtgagtgcaaaaaagaagccaaaggactgcagtgtgacacctgctttt

SEQ ID NO: 3397 - RNA, 149 nt, synthetic construct
  source 1..149: mol_type = other RNA; note = pegRNA
tttctctgcaggtgtcacacgttttagagctagaaatagcaagttaaaataaggctagtccgttatcaacttgaaaaagtggcaccgagtcggtgcgcagtgtgagtgcaaaaaagaagccaaaggacttcagtgtgacacctgcagag

SEQ ID NO: 3398 - RNA, 149 nt, synthetic construct
  source 1..149: mol_type = other RNA; note = pegRNA
tttctctgcaggtgtcacacgttttagagctagaaatagcaagttaaaataaggctagtccgttatcaacttgaaaaagtggcaccgagtcggtgcgcagtgtgagtgcaaaaaagaagccaaaggacttcagtgtgacacctgctttt

SEQ ID NO: 3399 - RNA, 149 nt, synthetic construct
  source 1..149: mol_type = other RNA; note = pegRNA
tttctctgcaggtgtcacacgttttagagctagaaatagcaagttaaaataaggctagtccgttatcaacttgaaaaagtggcaccgagtcggtgcgcagtgtgagtgcaaaaaagaagccaaaggattacagtgtgacacctgcagag

SEQ ID NO: 3400 - RNA, 149 nt, synthetic construct
  source 1..149: mol_type = other RNA; note = pegRNA
tttctctgcaggtgtcacacgttttagagctagaaatagcaagttaaaataaggctagtccgttatcaacttgaaaaagtggcaccgagtcggtgcgcagtgtgagtgcaaaaaagaagccaaaggattacagtgtgacacctgctttt

SEQ ID NO: 3401 - RNA, 149 nt, synthetic construct
  source 1..149: mol_type = other RNA; note = pegRNA
tttctctgcaggtgtcacacgttttagagctagaaatagcaagttaaaataaggctagtccgttatcaacttgaaaaagtggcaccgagtcggtgcgcagtgtgagtgcaaaaaagaagccaaaggattgcagtgtgacacctgcagag

SEQ ID NO: 3402 - RNA, 149 nt, synthetic construct
  source 1..149: mol_type = other RNA; note = pegRNA
tttctctgcaggtgtcacacgttttagagctagaaatagcaagttaaaataaggctagtccgttatcaacttgaaaaagtggcaccgagtcggtgcgcagtgtgagtgcaaaaaagaagccaaaggattgcagtgtgacacctgctttt

SEQ ID NO: 3403 - RNA, 149 nt, synthetic construct
  source 1..149: mol_type = other RNA; note = pegRNA
tttctctgcaggtgtcacacgttttagagctagaaatagcaagttaaaataaggctagtccgttatcaacttgaaaaagtggcaccgagtcggtgcggcagtgtgagtgcaaaaaagaagccaaaggactacagtgtgacacctgcaga

SEQ ID NO: 3404 - RNA, 149 nt, synthetic construct
  source 1..149: mol_type = other RNA; note = pegRNA
tttctctgcaggtgtcacacgttttagagctagaaatagcaagttaaaataaggctagtccgttatcaacttgaaaaagtggcaccgagtcggtgcggcagtgtgagtgcaaaaaagaagccaaaggactacagtgtgacacctgtttt

SEQ ID NO: 3405 - RNA, 149 nt, synthetic construct
  source 1..149: mol_type = other RNA; note = pegRNA
tttctctgcaggtgtcacacgttttagagctagaaatagcaagttaaaataaggctagtccgttatcaacttgaaaaagtggcaccgagtcggtgcggcagtgtgagtgcaaaaaagaagccaaaggactgcagtgtgacacctgcaga

SEQ ID NO: 3406 - RNA, 149 nt, synthetic construct
  source 1..149: mol_type = other RNA; note = pegRNA
tttctctgcaggtgtcacacgttttagagctagaaatagcaagttaaaataaggctagtccgttatcaacttgaaaaagtggcaccgagtcggtgcggcagtgtgagtgcaaaaaagaagccaaaggactgcagtgtgacacctgtttt

SEQ ID NO: 3407 - RNA, 149 nt, synthetic construct
  source 1..149: mol_type = other RNA; note = pegRNA
tttctctgcaggtgtcacacgttttagagctagaaatagcaagttaaaataaggctagtccgttatcaacttgaaaaagtggcaccgagtcggtgcggcagtgtgagtgcaaaaaagaagccaaaggattacagtgtgacacctgcaga

SEQ ID NO: 3408 - RNA, 149 nt, synthetic construct
  source 1..149: mol_type = other RNA; note = pegRNA
tttctctgcaggtgtcacacgttttagagctagaaatagcaagttaaaataaggctagtccgttatcaacttgaaaaagtggcaccgagtcggtgcggcagtgtgagtgcaaaaaagaagccaaaggattacagtgtgacacctgtttt

SEQ ID NO: 3409 - RNA, 149 nt, synthetic construct
  source 1..149: mol_type = other RNA; note = pegRNA
tttctctgcaggtgtcacacgttttagagctagaaatagcaagttaaaataaggctagtccgttatcaacttgaaaaagtggcaccgagtcggtgcggcagtgtgagtgcaaaaaagaagccaaaggattgcagtgtgacacctgcaga

SEQ ID NO: 3410 - RNA, 149 nt, synthetic construct
  source 1..149: mol_type = other RNA; note = pegRNA
tttctctgcaggtgtcacacgttttagagctagaaatagcaagttaaaataaggctagtccgttatcaacttgaaaaagtggcaccgagtcggtgcggcagtgtgagtgcaaaaaagaagccaaaggattgcagtgtgacacctgtttt

SEQ ID NO: 3411 - RNA, 149 nt, synthetic construct
  source 1..149: mol_type = other RNA; note = pegRNA
tttctctgcaggtgtcacacgttttagagctagaaatagcaagttaaaataaggctagtccgttatcaacttgaaaaagtggcaccgagtcggtgcgtgtgagtgcaaaaaagaagccaaaggactacagtgtgacacctgcagatttt

SEQ ID NO: 3412 - RNA, 149 nt, synthetic construct
  source 1..149: mol_type = other RNA; note = pegRNA
tttctctgcaggtgtcacacgttttagagctagaaatagcaagttaaaataaggctagtccgttatcaacttgaaaaagtggcaccgagtcggtgcgtgtgagtgcaaaaaagaagccaaaggactgcagtgtgacacctgcagatttt

SEQ ID NO: 3413 - RNA, 149 nt, synthetic construct
  source 1..149: mol_type = other RNA; note = pegRNA
tttctctgcaggtgtcacacgttttagagctagaaatagcaagttaaaataaggctagtccgttatcaacttgaaaaagtggcaccgagtcggtgcgtgtgagtgcaaaaaagaagccaaaggattacagtgtgacacctgcagatttt

SEQ ID NO: 3414 - RNA, 149 nt, synthetic construct
  source 1..149: mol_type = other RNA; note = pegRNA
tttctctgcaggtgtcacacgttttagagctagaaatagcaagttaaaataaggctagtccgttatcaacttgaaaaagtggcaccgagtcggtgcgtgtgagtgcaaaaaagaagccaaaggattgcagtgtgacacctgcagatttt

SEQ ID NO: 3415 - RNA, 150 nt, synthetic construct
  source 1..150: mol_type = other RNA; note = pegRNA
tttctctgcaggtgtcacacgttttagagctagaaatagcaagttaaaataaggctagtccgttatcaacttgaaaaagtggcaccgagtcggtgcagtgtgagtgcaaaaaagaagccaaaggactacagtgtgacacctgcagatttt

SEQ ID NO: 3416 - RNA, 150 nt, synthetic construct
  source 1..150: mol_type = other RNA; note = pegRNA
tttctctgcaggtgtcacacgttttagagctagaaatagcaagttaaaataaggctagtccgttatcaacttgaaaaagtggcaccgagtcggtgcagtgtgagtgcaaaaaagaagccaaaggactgcagtgtgacacctgcagatttt

SEQ ID NO: 3417 - RNA, 150 nt, synthetic construct
  source 1..150: mol_type = other RNA; note = pegRNA
tttctctgcaggtgtcacacgttttagagctagaaatagcaagttaaaataaggctagtccgttatcaacttgaaaaagtggcaccgagtcggtgcagtgtgagtgcaaaaaagaagccaaaggattacagtgtgacacctgcagatttt

SEQ ID NO: 3418 - RNA, 150 nt, synthetic construct
  source 1..150: mol_type = other RNA; note = pegRNA
tttctctgcaggtgtcacacgttttagagctagaaatagcaagttaaaataaggctagtccgttatcaacttgaaaaagtggcaccgagtcggtgcagtgtgagtgcaaaaaagaagccaaaggattgcagtgtgacacctgcagatttt

SEQ ID NO: 3419 - RNA, 150 nt, synthetic construct
  source 1..150: mol_type = other RNA; note = pegRNA
tttctctgcaggtgtcacacgttttagagctagaaatagcaagttaaaataaggctagtccgttatcaacttgaaaaagtggcaccgagtcggtgccagtgtgagtgcaaaaaagaagccaaaggactacagtgtgacacctgcagagaa

SEQ ID NO: 3420 - RNA, 150 nt, synthetic construct
  source 1..150: mol_type = other RNA; note = pegRNA
tttctctgcaggtgtcacacgttttagagctagaaatagcaagttaaaataaggctagtccgttatcaacttgaaaaagtggcaccgagtcggtgccagtgtgagtgcaaaaaagaagccaaaggactacagtgtgacacctgcagtttt

SEQ ID NO: 3421 - RNA, 150 nt, synthetic construct
  source 1..150: mol_type = other RNA; note = pegRNA
tttctctgcaggtgtcacacgttttagagctagaaatagcaagttaaaataaggctagtccgttatcaacttgaaaaagtggcaccgagtcggtgccagtgtgagtgcaaaaaagaagccaaaggactgcagtgtgacacctgcagagaa

SEQ ID NO: 3422 - RNA, 150 nt, synthetic construct
  source 1..150: mol_type = other RNA; note = pegRNA
tttctctgcaggtgtcacacgttttagagctagaaatagcaagttaaaataaggctagtccgttatcaacttgaaaaagtggcaccgagtcggtgccagtgtgagtgcaaaaaagaagccaaaggactgcagtgtgacacctgcagtttt

SEQ ID NO: 3423 - RNA, 150 nt, synthetic construct
  source 1..150: mol_type = other RNA; note = pegRNA
tttctctgcaggtgtcacacgttttagagctagaaatagcaagttaaaataaggctagtccgttatcaacttgaaaaagtggcaccgagtcggtgccagtgtgagtgcaaaaaagaagccaaaggattacagtgtgacacctgcagagaa

SEQ ID NO: 3424 - RNA, 150 nt, synthetic construct
  source 1..150: mol_type = other RNA; note = pegRNA
tttctctgcaggtgtcacacgttttagagctagaaatagcaagttaaaataaggctagtccgttatcaacttgaaaaagtggcaccgagtcggtgccagtgtgagtgcaaaaaagaagccaaaggattacagtgtgacacctgcagtttt

SEQ ID NO: 3425 - RNA, 150 nt, synthetic construct
  source 1..150: mol_type = other RNA; note = pegRNA
tttctctgcaggtgtcacacgttttagagctagaaatagcaagttaaaataaggctagtccgttatcaacttgaaaaagtggcaccgagtcggtgccagtgtgagtgcaaaaaagaagccaaaggattgcagtgtgacacctgcagagaa

SEQ ID NO: 3426 - RNA, 150 nt, synthetic construct
  source 1..150: mol_type = other RNA; note = pegRNA
tttctctgcaggtgtcacacgttttagagctagaaatagcaagttaaaataaggctagtccgttatcaacttgaaaaagtggcaccgagtcggtgccagtgtgagtgcaaaaaagaagccaaaggattgcagtgtgacacctgcagtttt

SEQ ID NO: 3427 - RNA, 150 nt, synthetic construct
  source 1..150: mol_type = other RNA; note = pegRNA
tttctctgcaggtgtcacacgttttagagctagaaatagcaagttaaaataaggctagtccgttatcaacttgaaaaagtggcaccgagtcggtgcgcagtgtgagtgcaaaaaagaagccaaaggactacagtgtgacacctgcagaga

SEQ ID NO: 3428 - RNA, 150 nt, synthetic construct
  source 1..150: mol_type = other RNA; note = pegRNA
tttctctgcaggtgtcacacgttttagagctagaaatagcaagttaaaataaggctagtccgttatcaacttgaaaaagtggcaccgagtcggtgcgcagtgtgagtgcaaaaaagaagccaaaggactacagtgtgacacctgcatttt

SEQ ID NO: 3429 - RNA, 150 nt, synthetic construct
  source 1..150: mol_type = other RNA; note = pegRNA
tttctctgcaggtgtcacacgttttagagctagaaatagcaagttaaaataaggctagtccgttatcaacttgaaaaagtggcaccgagtcggtgcgcagtgtgagtgcaaaaaagaagccaaaggactgcagtgtgacacctgcagaga

SEQ ID NO: 3430 - RNA, 150 nt, synthetic construct
  source 1..150: mol_type = other RNA; note = pegRNA
tttctctgcaggtgtcacacgttttagagctagaaatagcaagttaaaataaggctagtccgttatcaacttgaaaaagtggcaccgagtcggtgcgcagtgtgagtgcaaaaaagaagccaaaggactgcagtgtgacacctgcatttt

SEQ ID NO: 3431 - RNA, 150 nt, synthetic construct
  source 1..150: mol_type = other RNA; note = pegRNA
tttctctgcaggtgtcacacgttttagagctagaaatagcaagttaaaataaggctagtccgttatcaacttgaaaaagtggcaccgagtcggtgcgcagtgtgagtgcaaaaaagaagccaaaggattacagtgtgacacctgcagaga

SEQ ID NO: 3432 - RNA, 150 nt, synthetic construct
  source 1..150: mol_type = other RNA; note = pegRNA
tttctctgcaggtgtcacacgttttagagctagaaatagcaagttaaaataaggctagtccgttatcaacttgaaaaagtggcaccgagtcggtgcgcagtgtgagtgcaaaaaagaagccaaaggattacagtgtgacacctgcatttt

SEQ ID NO: 3433 - RNA, 150 nt, synthetic construct
  source 1..150: mol_type = other RNA; note = pegRNA
tttctctgcaggtgtcacacgttttagagctagaaatagcaagttaaaataaggctagtccgttatcaacttgaaaaagtggcaccgagtcggtgcgcagtgtgagtgcaaaaaagaagccaaaggattgcagtgtgacacctgcagaga

SEQ ID NO: 3434 - RNA, 150 nt, synthetic construct
  source 1..150: mol_type = other RNA; note = pegRNA
tttctctgcaggtgtcacacgttttagagctagaaatagcaagttaaaataaggctagtccgttatcaacttgaaaaagtggcaccgagtcggtgcgcagtgtgagtgcaaaaaagaagccaaaggattgcagtgtgacacctgcatttt

SEQ ID NO: 3435 - RNA, 150 nt, synthetic construct
  source 1..150: mol_type = other RNA; note = pegRNA
tttctctgcaggtgtcacacgttttagagctagaaatagcaagttaaaataaggctagtccgttatcaacttgaaaaagtggcaccgagtcggtgcggcagtgtgagtgcaaaaaagaagccaaaggactacagtgtgacacctgcagag

SEQ ID NO: 3436 - RNA, 150 nt, synthetic construct
  source 1..150: mol_type = other RNA; note = pegRNA
tttctctgcaggtgtcacacgttttagagctagaaatagcaagttaaaataaggctagtccgttatcaacttgaaaaagtggcaccgagtcggtgcggcagtgtgagtgcaaaaaagaagccaaaggactacagtgtgacacctgctttt

SEQ ID NO: 3437 - RNA, 150 nt, synthetic construct
  source 1..150: mol_type = other RNA; note = pegRNA
tttctctgcaggtgtcacacgttttagagctagaaatagcaagttaaaataaggctagtccgttatcaacttgaaaaagtggcaccgagtcggtgcggcagtgtgagtgcaaaaaagaagccaaaggactgcagtgtgacacctgcagag

SEQ ID NO: 3438 - RNA, 150 nt, synthetic construct
  source 1..150: mol_type = other RNA; note = pegRNA
tttctctgcaggtgtcacacgttttagagctagaaatagcaagttaaaataaggctagtccgttatcaacttgaaaaagtggcaccgagtcggtgcggcagtgtgagtgcaaaaaagaagccaaaggactgcagtgtgacacctgctttt

SEQ ID NO: 3439 - RNA, 150 nt, synthetic construct
  source 1..150: mol_type = other RNA; note = pegRNA
tttctctgcaggtgtcacacgttttagagctagaaatagcaagttaaaataaggctagtccgttatcaacttgaaaaagtggcaccgagtcggtgcggcagtgtgagtgcaaaaaagaagccaaaggacttcagtgtgacacctgcagag

SEQ ID NO: 3440 - RNA, 150 nt, synthetic construct
  source 1..150: mol_type = other RNA; note = pegRNA
tttctctgcaggtgtcacacgttttagagctagaaatagcaagttaaaataaggctagtccgttatcaacttgaaaaagtggcaccgagtcggtgcggcagtgtgagtgcaaaaaagaagccaaaggacttcagtgtgacacctgctttt

SEQ ID NO: 3441 - RNA, 150 nt, synthetic construct
  source 1..150: mol_type = other RNA; note = pegRNA
tttctctgcaggtgtcacacgttttagagctagaaatagcaagttaaaataaggctagtccgttatcaacttgaaaaagtggcaccgagtcggtgcggcagtgtgagtgcaaaaaagaagccaaaggattacagtgtgacacctgcagag

SEQ ID NO: 3442 - RNA, 150 nt, synthetic construct
  source 1..150: mol_type = other RNA; note = pegRNA
tttctctgcaggtgtcacacgttttagagctagaaatagcaagttaaaataaggctagtccgttatcaacttgaaaaagtggcaccgagtcggtgcggcagtgtgagtgcaaaaaagaagccaaaggattacagtgtgacacctgctttt

SEQ ID NO: 3443 - RNA, 150 nt, synthetic construct
  source 1..150: mol_type = other RNA; note = pegRNA
tttctctgcaggtgtcacacgttttagagctagaaatagcaagttaaaataaggctagtccgttatcaacttgaaaaagtggcaccgagtcggtgcggcagtgtgagtgcaaaaaagaagccaaaggattgcagtgtgacacctgcagag

SEQ ID NO: 3444 - RNA, 150 nt, synthetic construct
  source 1..150: mol_type = other RNA; note = pegRNA
tttctctgcaggtgtcacacgttttagagctagaaatagcaagttaaaataaggctagtccgttatcaacttgaaaaagtggcaccgagtcggtgcggcagtgtgagtgcaaaaaagaagccaaaggattgcagtgtgacacctgctttt

SEQ ID NO: 3445 - RNA, 150 nt, synthetic construct
  source 1..150: mol_type = other RNA; note = pegRNA
tttctctgcaggtgtcacacgttttagagctagaaatagcaagttaaaataaggctagtccgttatcaacttgaaaaagtggcaccgagtcggtgcgtgtgagtgcaaaaaagaagccaaaggactacagtgtgacacctgcagagtttt

SEQ ID NO: 3446 - RNA, 150 nt, synthetic construct
  source 1..150: mol_type = other RNA; note = pegRNA
tttctctgcaggtgtcacacgttttagagctagaaatagcaagttaaaataaggctagtccgttatcaacttgaaaaagtggcaccgagtcggtgcgtgtgagtgcaaaaaagaagccaaaggactgcagtgtgacacctgcagagtttt

SEQ ID NO: 3447 - RNA, 150 nt, synthetic construct
  source 1..150: mol_type = other RNA; note = pegRNA
tttctctgcaggtgtcacacgttttagagctagaaatagcaagttaaaataaggctagtccgttatcaacttgaaaaagtggcaccgagtcggtgcgtgtgagtgcaaaaaagaagccaaaggacttcagtgtgacacctgcagagtttt

SEQ ID NO: 3448 - RNA, 150 nt, synthetic construct
  source 1..150: mol_type = other RNA; note = pegRNA
tttctctgcaggtgtcacacgttttagagctagaaatagcaagttaaaataaggctagtccgttatcaacttgaaaaagtggcaccgagtcggtgcgtgtgagtgcaaaaaagaagccaaaggattacagtgtgacacctgcagagtttt

SEQ ID NO: 3449 - RNA, 150 nt, synthetic construct
  source 1..150: mol_type = other RNA; note = pegRNA
tttctctgcaggtgtcacacgttttagagctagaaatagcaagttaaaataaggctagtccgttatcaacttgaaaaagtggcaccgagtcggtgcgtgtgagtgcaaaaaagaagccaaaggattgcagtgtgacacctgcagagtttt

SEQ ID NO: 3450 - RNA, 151 nt, synthetic construct
  source 1..151: mol_type = other RNA; note = pegRNA
tttctctgcaggtgtcacacgttttagagctagaaatagcaagttaaaataaggctagtccgttatcaacttgaaaaagtggcaccgagtcggtgcagtgtgagtgcaaaaaagaagccaaaggactacagtgtgacacctgcagagtttt

SEQ ID NO: 3451 - RNA, 151 nt, synthetic construct
  source 1..151: mol_type = other RNA; note = pegRNA
tttctctgcaggtgtcacacgttttagagctagaaatagcaagttaaaataaggctagtccgttatcaacttgaaaaagtggcaccgagtcggtgcagtgtgagtgcaaaaaagaagccaaaggactgcagtgtgacacctgcagagtttt

SEQ ID NO: 3452 - RNA, 151 nt, synthetic construct
  source 1..151: mol_type = other RNA; note = pegRNA
tttctctgcaggtgtcacacgttttagagctagaaatagcaagttaaaataaggctagtccgttatcaacttgaaaaagtggcaccgagtcggtgcagtgtgagtgcaaaaaagaagccaaaggattacagtgtgacacctgcagagtttt

SEQ ID NO: 3453 - RNA, 151 nt, synthetic construct
  source 1..151: mol_type = other RNA; note = pegRNA
tttctctgcaggtgtcacacgttttagagctagaaatagcaagttaaaataaggctagtccgttatcaacttgaaaaagtggcaccgagtcggtgcagtgtgagtgcaaaaaagaagccaaaggattgcagtgtgacacctgcagagtttt

SEQ ID NO: 3454 - RNA, 151 nt, synthetic construct
  source 1..151: mol_type = other RNA; note = pegRNA
tttctctgcaggtgtcacacgttttagagctagaaatagcaagttaaaataaggctagtccgttatcaacttgaaaaagtggcaccgagtcggtgccagtgtgagtgcaaaaaagaagccaaaggactacagtgtgacacctgcagatttt

SEQ ID NO: 3455 - RNA, 151 nt, synthetic construct
  source 1..151: mol_type = other RNA; note = pegRNA
tttctctgcaggtgtcacacgttttagagctagaaatagcaagttaaaataaggctagtccgttatcaacttgaaaaagtggcaccgagtcggtgccagtgtgagtgcaaaaaagaagccaaaggactgcagtgtgacacctgcagatttt

SEQ ID NO: 3456 - RNA, 151 nt, synthetic construct
  source 1..151: mol_type = other RNA; note = pegRNA
tttctctgcaggtgtcacacgttttagagctagaaatagcaagttaaaataaggctagtccgttatcaacttgaaaaagtggcaccgagtcggtgccagtgtgagtgcaaaaaagaagccaaaggattacagtgtgacacctgcagatttt

SEQ ID NO: 3457 - RNA, 151 nt, synthetic construct
  source 1..151: mol_type = other RNA; note = pegRNA
tttctctgcaggtgtcacacgttttagagctagaaatagcaagttaaaataaggctagtccgttatcaacttgaaaaagtggcaccgagtcggtgccagtgtgagtgcaaaaaagaagccaaaggattgcagtgtgacacctgcagatttt

SEQ ID NO: 3458 - RNA, 151 nt, synthetic construct
  source 1..151: mol_type = other RNA; note = pegRNA
tttctctgcaggtgtcacacgttttagagctagaaatagcaagttaaaataaggctagtccgttatcaacttgaaaaagtggcaccgagtcggtgcgcagtgtgagtgcaaaaaagaagccaaaggactacagtgtgacacctgcagagaa

SEQ ID NO: 3459 - RNA, 151 nt, synthetic construct
  source 1..151: mol_type = other RNA; note = pegRNA
tttctctgcaggtgtcacacgttttagagctagaaatagcaagttaaaataaggctagtccgttatcaacttgaaaaagtggcaccgagtcggtgcgcagtgtgagtgcaaaaaagaagccaaaggactacagtgtgacacctgcagtttt

SEQ ID NO: 3460 - RNA, 151 nt, synthetic construct
  source 1..151: mol_type = other RNA; note = pegRNA
tttctctgcaggtgtcacacgttttagagctagaaatagcaagttaaaataaggctagtccgttatcaacttgaaaaagtggcaccgagtcggtgcgcagtgtgagtgcaaaaaagaagccaaaggactgcagtgtgacacctgcagagaa

SEQ ID NO: 3461 - RNA, 151 nt, synthetic construct
  source 1..151: mol_type = other RNA; note = pegRNA
tttctctgcaggtgtcacacgttttagagctagaaatagcaagttaaaataaggctagtccgttatcaacttgaaaaagtggcaccgagtcggtgcgcagtgtgagtgcaaaaaagaagccaaaggactgcagtgtgacacctgcagtttt

SEQ ID NO: 3462 - RNA, 151 nt, synthetic construct
  source 1..151: mol_type = other RNA; note = pegRNA
tttctctgcaggtgtcacacgttttagagctagaaatagcaagttaaaataaggctagtccgttatcaacttgaaaaagtggcaccgagtcggtgcgcagtgtgagtgcaaaaaagaagccaaaggacttcagtgtgacacctgcagtttt

SEQ ID NO: 3463 - RNA, 151 nt, synthetic construct
  source 1..151: mol_type = other RNA; note = pegRNA
tttctctgcaggtgtcacacgttttagagctagaaatagcaagttaaaataaggctagtccgttatcaacttgaaaaagtggcaccgagtcggtgcgcagtgtgagtgcaaaaaagaagccaaaggattacagtgtgacacctgcagagaa

SEQ ID NO: 3464 - RNA, 151 nt, synthetic construct
  source 1..151: mol_type = other RNA; note = pegRNA
tttctctgcaggtgtcacacgttttagagctagaaatagcaagttaaaataaggctagtccgttatcaacttgaaaaagtggcaccgagtcggtgcgcagtgtgagtgcaaaaaagaagccaaaggattacagtgtgacacctgcagtttt

SEQ ID NO: 3465 - RNA, 151 nt, synthetic construct
  source 1..151: mol_type = other RNA; note = pegRNA
tttctctgcaggtgtcacacgttttagagctagaaatagcaagttaaaataaggctagtccgttatcaacttgaaaaagtggcaccgagtcggtgcgcagtgtgagtgcaaaaaagaagccaaaggattgcagtgtgacacctgcagagaa

SEQ ID NO: 3466 - RNA, 151 nt, synthetic construct
  source 1..151: mol_type = other RNA; note = pegRNA
tttctctgcaggtgtcacacgttttagagctagaaatagcaagttaaaataaggctagtccgttatcaacttgaaaaagtggcaccgagtcggtgcgcagtgtgagtgcaaaaaagaagccaaaggattgcagtgtgacacctgcagtttt

SEQ ID NO: 3467 - RNA, 151 nt, synthetic construct
  source 1..151: mol_type = other RNA; note = pegRNA
tttctctgcaggtgtcacacgttttagagctagaaatagcaagttaaaataaggctagtccgttatcaacttgaaaaagtggcaccgagtcggtgcggcagtgtgagtgcaaaaaagaagccaaaggactacagtgtgacacctgcagaga

SEQ ID NO: 3468 - RNA, 151 nt, synthetic construct
  source 1..151: mol_type = other RNA; note = pegRNA
tttctctgcaggtgtcacacgttttagagctagaaatagcaagttaaaataaggctagtccgttatcaacttgaaaaagtggcaccgagtcggtgcggcagtgtgagtgcaaaaaagaagccaaaggactacagtgtgacacctgcatttt

SEQ ID NO: 3469 - RNA, 151 nt, synthetic construct
  source 1..151: mol_type = other RNA; note = pegRNA
tttctctgcaggtgtcacacgttttagagctagaaatagcaagttaaaataaggctagtccgttatcaacttgaaaaagtggcaccgagtcggtgcggcagtgtgagtgcaaaaaagaagccaaaggactgcagtgtgacacctgcagaga

SEQ ID NO: 3470 - RNA, 151 nt, synthetic construct
  source 1..151: mol_type = other RNA; note = pegRNA
tttctctgcaggtgtcacacgttttagagctagaaatagcaagttaaaataaggctagtccgttatcaacttgaaaaagtggcaccgagtcggtgcggcagtgtgagtgcaaaaaagaagccaaaggactgcagtgtgacacctgcatttt

SEQ ID NO: 3471 - RNA, 151 nt, synthetic construct
  source 1..151: mol_type = other RNA; note = pegRNA
tttctctgcaggtgtcacacgttttagagctagaaatagcaagttaaaataaggctagtccgttatcaacttgaaaaagtggcaccgagtcggtgcggcagtgtgagtgcaaaaaagaagccaaaggattacagtgtgacacctgcagaga

SEQ ID NO: 3472 - RNA, 151 nt, synthetic construct
  source 1..151: mol_type = other RNA; note = pegRNA
tttctctgcaggtgtcacacgttttagagctagaaatagcaagttaaaataaggctagtccgttatcaacttgaaaaagtggcaccgagtcggtgcggcagtgtgagtgcaaaaaagaagccaaaggattacagtgtgacacctgcatttt

SEQ ID NO: 3473 - RNA, 151 nt, synthetic construct
  source 1..151: mol_type = other RNA; note = pegRNA
tttctctgcaggtgtcacacgttttagagctagaaatagcaagttaaaataaggctagtccgttatcaacttgaaaaagtggcaccgagtcggtgcggcagtgtgagtgcaaaaaagaagccaaaggattgcagtgtgacacctgcagaga

SEQ ID NO: 3474 - RNA, 151 nt, synthetic construct
  source 1..151: mol_type = other RNA; note = pegRNA
tttctctgcaggtgtcacacgttttagagctagaaatagcaagttaaaataaggctagtccgttatcaacttgaaaaagtggcaccgagtcggtgcggcagtgtgagtgcaaaaaagaagccaaaggattgcagtgtgacacctgcatttt

SEQ ID NO: 3475 - RNA, 151 nt, synthetic construct
  source 1..151: mol_type = other RNA; note = pegRNA
tttctctgcaggtgtcacacgttttagagctagaaatagcaagttaaaataaggctagtccgttatcaacttgaaaaagtggcaccgagtcggtgcgtgtgagtgcaaaaaagaagccaaaggactacagtgtgacacctgcagagatttt

SEQ ID NO: 3476 - RNA, 151 nt, synthetic construct
  source 1..151: mol_type = other RNA; note = pegRNA
tttctctgcaggtgtcacacgttttagagctagaaatagcaagttaaaataaggctagtccgttatcaacttgaaaaagtggcaccgagtcggtgcgtgtgagtgcaaaaaagaagccaaaggactgcagtgtgacacctgcagagatttt

SEQ ID NO: 3477 - RNA, 151 nt, synthetic construct
  source 1..151: mol_type = other RNA; note = pegRNA
tttctctgcaggtgtcacacgttttagagctagaaatagcaagttaaaataaggctagtccgttatcaacttgaaaaagtggcaccgagtcggtgcgtgtgagtgcaaaaaagaagccaaaggattacagtgtgacacctgcagagatttt

SEQ ID NO: 3478 - RNA, 151 nt, synthetic construct
  source 1..151: mol_type = other RNA; note = pegRNA
tttctctgcaggtgtcacacgttttagagctagaaatagcaagttaaaataaggctagtccgttatcaacttgaaaaagtggcaccgagtcggtgcgtgtgagtgcaaaaaagaagccaaaggattgcagtgtgacacctgcagagatttt

SEQ ID NO: 3479 - RNA, 152 nt, synthetic construct
  source 1..152: mol_type = other RNA; note = pegRNA
tttctctgcaggtgtcacacgttttagagctagaaatagcaagttaaaataaggctagtccgttatcaacttgaaaaagtggcaccgagtcggtgcagtgtgagtgcaaaaaagaagccaaaggactacagtgtgacacctgcagagatttt

SEQ ID NO: 3480 - RNA, 152 nt, synthetic construct
  source 1..152: mol_type = other RNA; note = pegRNA
tttctctgcaggtgtcacacgttttagagctagaaatagcaagttaaaataaggctagtccgttatcaacttgaaaaagtggcaccgagtcggtgcagtgtgagtgcaaaaaagaagccaaaggactgcagtgtgacacctgcagagatttt

SEQ ID NO: 3481 - RNA, 152 nt, synthetic construct
  source 1..152: mol_type = other RNA; note = pegRNA
tttctctgcaggtgtcacacgttttagagctagaaatagcaagttaaaataaggctagtccgttatcaacttgaaaaagtggcaccgagtcggtgcagtgtgagtgcaaaaaagaagccaaaggattacagtgtgacacctgcagagatttt

SEQ ID NO: 3482 - RNA, 152 nt, synthetic construct
  source 1..152: mol_type = other RNA; note = pegRNA
tttctctgcaggtgtcacacgttttagagctagaaatagcaagttaaaataaggctagtccgttatcaacttgaaaaagtggcaccgagtcggtgcagtgtgagtgcaaaaaagaagccaaaggattgcagtgtgacacctgcagagatttt

SEQ ID NO: 3483 - RNA, 152 nt, synthetic construct
  source 1..152: mol_type = other RNA; note = pegRNA
tttctctgcaggtgtcacacgttttagagctagaaatagcaagttaaaataaggctagtccgttatcaacttgaaaaagtggcaccgagtcggtgccagtgtgagtgcaaaaaagaagccaaaggactacagtgtgacacctgcagagtttt

SEQ ID NO: 3484 - RNA, 152 nt, synthetic construct
  source 1..152: mol_type = other RNA; note = pegRNA
tttctctgcaggtgtcacacgttttagagctagaaatagcaagttaaaataaggctagtccgttatcaacttgaaaaagtggcaccgagtcggtgccagtgtgagtgcaaaaaagaagccaaaggactgcagtgtgacacctgcagagtttt

SEQ ID NO: 3485 - RNA, 152 nt, synthetic construct
  source 1..152: mol_type = other RNA; note = pegRNA
tttctctgcaggtgtcacacgttttagagctagaaatagcaagttaaaataaggctagtccgttatcaacttgaaaaagtggcaccgagtcggtgccagtgtgagtgcaaaaaagaagccaaaggattacagtgtgacacctgcagagtttt

SEQ ID NO: 3486 - RNA, 152 nt, synthetic construct
  source 1..152: mol_type = other RNA; note = pegRNA
tttctctgcaggtgtcacacgttttagagctagaaatagcaagttaaaataaggctagtccgttatcaacttgaaaaagtggcaccgagtcggtgccagtgtgagtgcaaaaaagaagccaaaggattgcagtgtgacacctgcagagtttt

SEQ ID NO: 3487 - RNA, 152 nt, synthetic construct
  source 1..152: mol_type = other RNA; note = pegRNA
tttctctgcaggtgtcacacgttttagagctagaaatagcaagttaaaataaggctagtccgttatcaacttgaaaaagtggcaccgagtcggtgcgcagtgtgagtgcaaaaaagaagccaaaggactacagtgtgacacctgcagatttt

SEQ ID NO: 3488 - RNA, 152 nt, synthetic construct
  source 1..152: mol_type = other RNA; note = pegRNA
tttctctgcaggtgtcacacgttttagagctagaaatagcaagttaaaataaggctagtccgttatcaacttgaaaaagtggcaccgagtcggtgcgcagtgtgagtgcaaaaaagaagccaaaggactgcagtgtgacacctgcagatttt

SEQ ID NO: 3489 - RNA, 152 nt, synthetic construct
  source 1..152: mol_type = other RNA; note = pegRNA
tttctctgcaggtgtcacacgttttagagctagaaatagcaagttaaaataaggctagtccgttatcaacttgaaaaagtggcaccgagtcggtgcgcagtgtgagtgcaaaaaagaagccaaaggattacagtgtgacacctgcagatttt

SEQ ID NO: 3490 - RNA, 152 nt, synthetic construct
  source 1..152: mol_type = other RNA; note = pegRNA
tttctctgcaggtgtcacacgttttagagctagaaatagcaagttaaaataaggctagtccgttatcaacttgaaaaagtggcaccgagtcggtgcgcagtgtgagtgcaaaaaagaagccaaaggattgcagtgtgacacctgcagatttt

SEQ ID NO: 3491 - RNA, 152 nt, synthetic construct
  source 1..152: mol_type = other RNA; note = pegRNA
tttctctgcaggtgtcacacgttttagagctagaaatagcaagttaaaataaggctagtccgttatcaacttgaaaaagtggcaccgagtcggtgcggcagtgtgagtgcaaaaaagaagccaaaggactacagtgtgacacctgcagagaa

SEQ ID NO: 3492 - RNA, 152 nt, synthetic construct
  source 1..152: mol_type = other RNA; note = pegRNA
tttctctgcaggtgtcacacgttttagagctagaaatagcaagttaaaataaggctagtccgttatcaacttgaaaaagtggcaccgagtcggtgcggcagtgtgagtgcaaaaaagaagccaaaggactacagtgtgacacctgcagtttt

SEQ ID NO: 3493 - RNA, 152 nt, synthetic construct
  source 1..152: mol_type = other RNA; note = pegRNA
tttctctgcaggtgtcacacgttttagagctagaaatagcaagttaaaataaggctagtccgttatcaacttgaaaaagtggcaccgagtcggtgcggcagtgtgagtgcaaaaaagaagccaaaggactgcagtgtgacacctgcagagaa

SEQ ID NO: 3494 - RNA, 152 nt, synthetic construct
  source 1..152: mol_type = other RNA; note = pegRNA
tttctctgcaggtgtcacacgttttagagctagaaatagcaagttaaaataaggctagtccgttatcaacttgaaaaagtggcaccgagtcggtgcggcagtgtgagtgcaaaaaagaagccaaaggactgcagtgtgacacctgcagtttt

SEQ ID NO: 3495 - RNA, 152 nt, synthetic construct
  source 1..152: mol_type = other RNA; note = pegRNA
tttctctgcaggtgtcacacgttttagagctagaaatagcaagttaaaataaggctagtccgttatcaacttgaaaaagtggcaccgagtcggtgcggcagtgtgagtgcaaaaaagaagccaaaggacttcagtgtgacacctgcagtttt

SEQ ID NO: 3496 - RNA, 152 nt, synthetic construct
  source 1..152: mol_type = other RNA; note = pegRNA
tttctctgcaggtgtcacacgttttagagctagaaatagcaagttaaaataaggctagtccgttatcaacttgaaaaagtggcaccgagtcggtgcggcagtgtgagtgcaaaaaagaagccaaaggattacagtgtgacacctgcagagaa

SEQ ID NO: 3497 - RNA, 152 nt, synthetic construct
  source 1..152: mol_type = other RNA; note = pegRNA
tttctctgcaggtgtcacacgttttagagctagaaatagcaagttaaaataaggctagtccgttatcaacttgaaaaagtggcaccgagtcggtgcggcagtgtgagtgcaaaaaagaagccaaaggattacagtgtgacacctgcagtttt

SEQ ID NO: 3498 - RNA, 152 nt, synthetic construct
  source 1..152: mol_type = other RNA; note = pegRNA
tttctctgcaggtgtcacacgttttagagctagaaatagcaagttaaaataaggctagtccgttatcaacttgaaaaagtggcaccgagtcggtgcggcagtgtgagtgcaaaaaagaagccaaaggattgcagtgtgacacctgcagagaa

SEQ ID NO: 3499 - RNA, 152 nt, synthetic construct
  source 1..152: mol_type = other RNA; note = pegRNA
tttctctgcaggtgtcacacgttttagagctagaaatagcaagttaaaataaggctagtccgttatcaacttgaaaaagtggcaccgagtcggtgcggcagtgtgagtgcaaaaaagaagccaaaggattgcagtgtgacacctgcagtttt

SEQ ID NO: 3500 - RNA, 152 nt, synthetic construct
  source 1..152: mol_type = other RNA; note = pegRNA
tttctctgcaggtgtcacacgttttagagctagaaatagcaagttaaaataaggctagtccgttatcaacttgaaaaagtggcaccgagtcggtgcgtgtgagtgcaaaaaagaagccaaaggactacagtgtgacacctgcagagaatttt

SEQ ID NO: 3501 - RNA, 152 nt, synthetic construct
  source 1..152: mol_type = other RNA; note = pegRNA
tttctctgcaggtgtcacacgttttagagctagaaatagcaagttaaaataaggctagtccgttatcaacttgaaaaagtggcaccgagtcggtgcgtgtgagtgcaaaaaagaagccaaaggactgcagtgtgacacctgcagagaatttt

SEQ ID NO: 3502 - RNA, 152 nt, synthetic construct
  source 1..152: mol_type = other RNA; note = pegRNA
tttctctgcaggtgtcacacgttttagagctagaaatagcaagttaaaataaggctagtccgttatcaacttgaaaaagtggcaccgagtcggtgcgtgtgagtgcaaaaaagaagccaaaggattacagtgtgacacctgcagagaatttt

SEQ ID NO: 3503 - RNA, 152 nt, synthetic construct
  source 1..152: mol_type = other RNA; note = pegRNA
tttctctgcaggtgtcacacgttttagagctagaaatagcaagttaaaataaggctagtccgttatcaacttgaaaaagtggcaccgagtcggtgcgtgtgagtgcaaaaaagaagccaaaggattgcagtgtgacacctgcagagaatttt

SEQ ID NO: 3504 - RNA, 153 nt, synthetic construct
  source 1..153: mol_type = other RNA; note = pegRNA
tttctctgcaggtgtcacacgttttagagctagaaatagcaagttaaaataaggctagtccgttatcaacttgaaaaagtggcaccgagtcggtgcagtgtgagtgcaaaaaagaagccaaaggactacagtgtgacacctgcagagaatttt

SEQ ID NO: 3505 - RNA, 153 nt, synthetic construct
  source 1..153: mol_type = other RNA; note = pegRNA
tttctctgcaggtgtcacacgttttagagctagaaatagcaagttaaaataaggctagtccgttatcaacttgaaaaagtggcaccgagtcggtgcagtgtgagtgcaaaaaagaagccaaaggactgcagtgtgacacctgcagagaatttt

SEQ ID NO: 3506 - RNA, 153 nt, synthetic construct
  source 1..153: mol_type = other RNA; note = pegRNA
tttctctgcaggtgtcacacgttttagagctagaaatagcaagttaaaataaggctagtccgttatcaacttgaaaaagtggcaccgagtcggtgcagtgtgagtgcaaaaaagaagccaaaggattacagtgtgacacctgcagagaatttt

SEQ ID NO: 3507 - RNA, 153 nt, synthetic construct
  source 1..153: mol_type = other RNA; note = pegRNA
tttctctgcaggtgtcacacgttttagagctagaaatagcaagttaaaataaggctagtccgttatcaacttgaaaaagtggcaccgagtcggtgcagtgtgagtgcaaaaaagaagccaaaggattgcagtgtgacacctgcagagaatttt

SEQ ID NO: 3508 - RNA, 153 nt, synthetic construct
  source 1..153: mol_type = other RNA; note = pegRNA
tttctctgcaggtgtcacacgttttagagctagaaatagcaagttaaaataaggctagtccgttatcaacttgaaaaagtggcaccgagtcggtgccagtgtgagtgcaaaaaagaagccaaaggactacagtgtgacacctgcagagatttt

SEQ ID NO: 3509 - RNA, 153 nt, synthetic construct
  source 1..153: mol_type = other RNA; note = pegRNA
tttctctgcaggtgtcacacgttttagagctagaaatagcaagttaaaataaggctagtccgttatcaacttgaaaaagtggcaccgagtcggtgccagtgtgagtgcaaaaaagaagccaaaggactgcagtgtgacacctgcagagatttt

SEQ ID NO: 3510 - RNA, 153 nt, synthetic construct
  source 1..153: mol_type = other RNA; note = pegRNA
tttctctgcaggtgtcacacgttttagagctagaaatagcaagttaaaataaggctagtccgttatcaacttgaaaaagtggcaccgagtcggtgccagtgtgagtgcaaaaaagaagccaaaggattacagtgtgacacctgcagagatttt

SEQ ID NO: 3511 - RNA, 153 nt, synthetic construct
  source 1..153: mol_type = other RNA; note = pegRNA
tttctctgcaggtgtcacacgttttagagctagaaatagcaagttaaaataaggctagtccgttatcaacttgaaaaagtggcaccgagtcggtgccagtgtgagtgcaaaaaagaagccaaaggattgcagtgtgacacctgcagagatttt

SEQ ID NO: 3512 - RNA, 153 nt, synthetic construct
  source 1..153: mol_type = other RNA; note = pegRNA
tttctctgcaggtgtcacacgttttagagctagaaatagcaagttaaaataaggctagtccgttatcaacttgaaaaagtggcaccgagtcggtgcgcagtgtgagtgcaaaaaagaagccaaaggactacagtgtgacacctgcagagtttt

SEQ ID NO: 3513 - RNA, 153 nt, synthetic construct
  source 1..153: mol_type = other RNA; note = pegRNA
tttctctgcaggtgtcacacgttttagagctagaaatagcaagttaaaataaggctagtccgttatcaacttgaaaaagtggcaccgagtcggtgcgcagtgtgagtgcaaaaaagaagccaaaggactgcagtgtgacacctgcagagtttt

SEQ ID NO: 3514 - RNA, 153 nt, synthetic construct
  source 1..153: mol_type = other RNA; note = pegRNA
tttctctgcaggtgtcacacgttttagagctagaaatagcaagttaaaataaggctagtccgttatcaacttgaaaaagtggcaccgagtcggtgcgcagtgtgagtgcaaaaaagaagccaaaggacttcagtgtgacacctgcagagtttt

SEQ ID NO: 3515 - RNA, 153 nt, synthetic construct
  source 1..153: mol_type = other RNA; note = pegRNA
tttctctgcaggtgtcacacgttttagagctagaaatagcaagttaaaataaggctagtccgttatcaacttgaaaaagtggcaccgagtcggtgcgcagtgtgagtgcaaaaaagaagccaaaggattacagtgtgacacctgcagagtttt

SEQ ID NO: 3516 - RNA, 153 nt, synthetic construct
  source 1..153: mol_type = other RNA; note = pegRNA
tttctctgcaggtgtcacacgttttagagctagaaatagcaagttaaaataaggctagtccgttatcaacttgaaaaagtggcaccgagtcggtgcgcagtgtgagtgcaaaaaagaagccaaaggattgcagtgtgacacctgcagagtttt

SEQ ID NO: 3517 - RNA, 153 nt, synthetic construct
  source 1..153: mol_type = other RNA; note = pegRNA
tttctctgcaggtgtcacacgttttagagctagaaatagcaagttaaaataaggctagtccgttatcaacttgaaaaagtggcaccgagtcggtgcggcagtgtgagtgcaaaaaagaagccaaaggactacagtgtgacacctgcagatttt

SEQ ID NO: 3518 - RNA, 153 nt, synthetic construct
  source 1..153: mol_type = other RNA; note = pegRNA
tttctctgcaggtgtcacacgttttagagctagaaatagcaagttaaaataaggctagtccgttatcaacttgaaaaagtggcaccgagtcggtgcggcagtgtgagtgcaaaaaagaagccaaaggactgcagtgtgacacctgcagatttt

SEQ ID NO: 3519 - RNA, 153 nt, synthetic construct
  source 1..153: mol_type = other RNA; note = pegRNA
tttctctgcaggtgtcacacgttttagagctagaaatagcaagttaaaataaggctagtccgttatcaacttgaaaaagtggcaccgagtcggtgcggcagtgtgagtgcaaaaaagaagccaaaggattacagtgtgacacctgcagatttt

SEQ ID NO: 3520 - RNA, 153 nt, synthetic construct
  source 1..153: mol_type = other RNA; note = pegRNA
tttctctgcaggtgtcacacgttttagagctagaaatagcaagttaaaataaggctagtccgttatcaacttgaaaaagtggcaccgagtcggtgcggcagtgtgagtgcaaaaaagaagccaaaggattgcagtgtgacacctgcagatttt

SEQ ID NO: 3521 - RNA, 154 nt, synthetic construct
  source 1..154: mol_type = other RNA; note = pegRNA
tttctctgcaggtgtcacacgttttagagctagaaatagcaagttaaaataaggctagtccgttatcaacttgaaaaagtggcaccgagtcggtgccagtgtgagtgcaaaaaagaagccaaaggactacagtgtgacacctgcagagaatttt

SEQ ID NO: 3522 - RNA, 154 nt, synthetic construct
  source 1..154: mol_type = other RNA; note = pegRNA
tttctctgcaggtgtcacacgttttagagctagaaatagcaagttaaaataaggctagtccgttatcaacttgaaaaagtggcaccgagtcggtgccagtgtgagtgcaaaaaagaagccaaaggactgcagtgtgacacctgcagagaatttt

SEQ ID NO: 3523 - RNA, 154 nt, synthetic construct
  source 1..154: mol_type = other RNA; note = pegRNA
tttctctgcaggtgtcacacgttttagagctagaaatagcaagttaaaataaggctagtccgttatcaacttgaaaaagtggcaccgagtcggtgccagtgtgagtgcaaaaaagaagccaaaggattacagtgtgacacctgcagagaatttt

SEQ ID NO: 3524 - RNA, 154 nt, synthetic construct
  source 1..154: mol_type = other RNA; note = pegRNA
tttctctgcaggtgtcacacgttttagagctagaaatagcaagttaaaataaggctagtccgttatcaacttgaaaaagtggcaccgagtcggtgccagtgtgagtgcaaaaaagaagccaaaggattgcagtgtgacacctgcagagaatttt

SEQ ID NO: 3525 - RNA, 154 nt, synthetic construct
  source 1..154: mol_type = other RNA; note = pegRNA
tttctctgcaggtgtcacacgttttagagctagaaatagcaagttaaaataaggctagtccgttatcaacttgaaaaagtggcaccgagtcggtgcgcagtgtgagtgcaaaaaagaagccaaaggactacagtgtgacacctgcagagatttt

SEQ ID NO: 3526 - RNA, 154 nt, synthetic construct
  source 1..154: mol_type = other RNA; note = pegRNA
tttctctgcaggtgtcacacgttttagagctagaaatagcaagttaaaataaggctagtccgttatcaacttgaaaaagtggcaccgagtcggtgcgcagtgtgagtgcaaaaaagaagccaaaggactgcagtgtgacacctgcagagatttt

SEQ ID NO: 3527 - RNA, 154 nt, synthetic construct
  source 1..154: mol_type = other RNA; note = pegRNA
tttctctgcaggtgtcacacgttttagagctagaaatagcaagttaaaataaggctagtccgttatcaacttgaaaaagtggcaccgagtcggtgcgcagtgtgagtgcaaaaaagaagccaaaggattacagtgtgacacctgcagagatttt

SEQ ID NO: 3528 - RNA, 154 nt, synthetic construct
  source 1..154: mol_type = other RNA; note = pegRNA
tttctctgcaggtgtcacacgttttagagctagaaatagcaagttaaaataaggctagtccgttatcaacttgaaaaagtggcaccgagtcggtgcgcagtgtgagtgcaaaaaagaagccaaaggattgcagtgtgacacctgcagagatttt

SEQ ID NO: 3529 - RNA, 154 nt, synthetic construct
  source 1..154: mol_type = other RNA; note = pegRNA
tttctctgcaggtgtcacacgttttagagctagaaatagcaagttaaaataaggctagtccgttatcaacttgaaaaagtggcaccgagtcggtgcggcagtgtgagtgcaaaaaagaagccaaaggactacagtgtgacacctgcagagtttt

SEQ ID NO: 3530 - RNA, 154 nt, synthetic construct
  source 1..154: mol_type = other RNA; note = pegRNA
tttctctgcaggtgtcacacgttttagagctagaaatagcaagttaaaataaggctagtccgttatcaacttgaaaaagtggcaccgagtcggtgcggcagtgtgagtgcaaaaaagaagccaaaggactgcagtgtgacacctgcagagtttt

SEQ ID NO: 3531 - RNA, 154 nt, synthetic construct
  source 1..154: mol_type = other RNA; note = pegRNA
tttctctgcaggtgtcacacgttttagagctagaaatagcaagttaaaataaggctagtccgttatcaacttgaaaaagtggcaccgagtcggtgcggcagtgtgagtgcaaaaaagaagccaaaggacttcagtgtgacacctgcagagtttt

SEQ ID NO: 3532 - RNA, 154 nt, synthetic construct
  source 1..154: mol_type = other RNA; note = pegRNA
tttctctgcaggtgtcacacgttttagagctagaaatagcaagttaaaataaggctagtccgttatcaacttgaaaaagtggcaccgagtcggtgcggcagtgtgagtgcaaaaaagaagccaaaggattacagtgtgacacctgcagagtttt

SEQ ID NO: 3533 - RNA, 154 nt, synthetic construct
  source 1..154: mol_type = other RNA; note = pegRNA
tttctctgcaggtgtcacacgttttagagctagaaatagcaagttaaaataaggctagtccgttatcaacttgaaaaagtggcaccgagtcggtgcggcagtgtgagtgcaaaaaagaagccaaaggattgcagtgtgacacctgcagagtttt

SEQ ID NO: 3534 - RNA, 155 nt, synthetic construct
  source 1..155: mol_type = other RNA; note = pegRNA
tttctctgcaggtgtcacacgttttagagctagaaatagcaagttaaaataaggctagtccgttatcaacttgaaaaagtggcaccgagtcggtgcgcagtgtgagtgcaaaaaagaagccaaaggactacagtgtgacacctgcagagaatttt

SEQ ID NO: 3535 - RNA, 155 nt, synthetic construct
  source 1..155: mol_type = other RNA; note = pegRNA
tttctctgcaggtgtcacacgttttagagctagaaatagcaagttaaaataaggctagtccgttatcaacttgaaaaagtggcaccgagtcggtgcgcagtgtgagtgcaaaaaagaagccaaaggactgcagtgtgacacctgcagagaatttt

SEQ ID NO: 3536 - RNA, 155 nt, synthetic construct
  source 1..155: mol_type = other RNA; note = pegRNA
tttctctgcaggtgtcacacgttttagagctagaaatagcaagttaaaataaggctagtccgttatcaacttgaaaaagtggcaccgagtcggtgcgcagtgtgagtgcaaaaaagaagccaaaggattacagtgtgacacctgcagagaatttt

SEQ ID NO: 3537 - RNA, 155 nt, synthetic construct
  source 1..155: mol_type = other RNA; note = pegRNA
tttctctgcaggtgtcacacgttttagagctagaaatagcaagttaaaataaggctagtccgttatcaacttgaaaaagtggcaccgagtcggtgcgcagtgtgagtgcaaaaaagaagccaaaggattgcagtgtgacacctgcagagaatttt

SEQ ID NO: 3538 - RNA, 155 nt, synthetic construct
  source 1..155: mol_type = other RNA; note = pegRNA
tttctctgcaggtgtcacacgttttagagctagaaatagcaagttaaaataaggctagtccgttatcaacttgaaaaagtggcaccgagtcggtgcggcagtgtgagtgcaaaaaagaagccaaaggactacagtgtgacacctgcagagatttt

SEQ ID NO: 3539 - RNA, 155 nt, synthetic construct
  source 1..155: mol_type = other RNA; note = pegRNA
tttctctgcaggtgtcacacgttttagagctagaaatagcaagttaaaataaggctagtccgttatcaacttgaaaaagtggcaccgagtcggtgcggcagtgtgagtgcaaaaaagaagccaaaggactgcagtgtgacacctgcagagatttt

SEQ ID NO: 3540 - RNA, 155 nt, synthetic construct
  source 1..155: mol_type = other RNA; note = pegRNA
tttctctgcaggtgtcacacgttttagagctagaaatagcaagttaaaataaggctagtccgttatcaacttgaaaaagtggcaccgagtcggtgcggcagtgtgagtgcaaaaaagaagccaaaggattacagtgtgacacctgcagagatttt

SEQ ID NO: 3541 - RNA, 155 nt, synthetic construct
  source 1..155: mol_type = other RNA; note = pegRNA
tttctctgcaggtgtcacacgttttagagctagaaatagcaagttaaaataaggctagtccgttatcaacttgaaaaagtggcaccgagtcggtgcggcagtgtgagtgcaaaaaagaagccaaaggattgcagtgtgacacctgcagagatttt

SEQ ID NO: 3542 - RNA, 156 nt, synthetic construct
  source 1..156: mol_type = other RNA; note = pegRNA
tttctctgcaggtgtcacacgttttagagctagaaatagcaagttaaaataaggctagtccgttatcaacttgaaaaagtggcaccgagtcggtgcggcagtgtgagtgcaaaaaagaagccaaaggactacagtgtgacacctgcagagaatttt

SEQ ID NO: 3543 - RNA, 156 nt, synthetic construct
  source 1..156: mol_type = other RNA; note = pegRNA
tttctctgcaggtgtcacacgttttagagctagaaatagcaagttaaaataaggctagtccgttatcaacttgaaaaagtggcaccgagtcggtgcggcagtgtgagtgcaaaaaagaagccaaaggactgcagtgtgacacctgcagagaatttt

SEQ ID NO: 3544 - RNA, 156 nt, synthetic construct
  source 1..156: mol_type = other RNA; note = pegRNA
tttctctgcaggtgtcacacgttttagagctagaaatagcaagttaaaataaggctagtccgttatcaacttgaaaaagtggcaccgagtcggtgcggcagtgtgagtgcaaaaaagaagccaaaggattacagtgtgacacctgcagagaatttt

SEQ ID NO: 3545 - RNA, 156 nt, synthetic construct
  source 1..156: mol_type = other RNA; note = pegRNA
tttctctgcaggtgtcacacgttttagagctagaaatagcaagttaaaataaggctagtccgttatcaacttgaaaaagtggcaccgagtcggtgcggcagtgtgagtgcaaaaaagaagccaaaggattgcagtgtgacacctgcagagaatttt

SEQ ID NO: 3546-3550 - skipped (5 entries)

SEQ ID NO: 3551 - RNA, 10 nt, synthetic construct
  source 1..10: mol_type = other RNA; note = PBS
gacttcagtg

SEQ ID NO: 3552 - RNA, 11 nt, synthetic construct
  source 1..11: mol_type = other RNA; note = PBS
gacttcagtgt

SEQ ID NO: 3553 - RNA, 12 nt, synthetic construct
  source 1..12: mol_type = other RNA; note = PBS
gacttcagtgtg

SEQ ID NO: 3554 - RNA, 13 nt, synthetic construct
  source 1..13: mol_type = other RNA; note = PBS
gacttcagtgtga

SEQ ID NO: 3555 - RNA, 14 nt, synthetic construct
  source 1..14: mol_type = other RNA; note = PBS
gacttcagtgtgac

SEQ ID NO: 3556 - RNA, 15 nt, synthetic construct
  source 1..15: mol_type = other RNA; note = PBS
gacttcagtgtgaca

SEQ ID NO: 3557 - RNA, 16 nt, synthetic construct
  source 1..16: mol_type = other RNA; note = PBS
gacttcagtgtgacac

SEQ ID NO: 3558 - RNA, 17 nt, synthetic construct
  source 1..17: mol_type = other RNA; note = PBS
gacttcagtgtgacacc

SEQ ID NO: 3559 - RNA, 18 nt, synthetic construct
  source 1..18: mol_type = other RNA; note = PBS
gacttcagtgtgacacct

SEQ ID NO: 3560 - RNA, 19 nt, synthetic construct
  source 1..19: mol_type = other RNA; note = PBS
gacttcagtgtgacacctg

SEQ ID NO: 3561 - RNA, 17 nt, synthetic construct
  source 1..17: mol_type = other RNA; note = PEgRNA spacer (TG;TGG PAM)
gtcacactgaagtcctt

SEQ ID NO: 3562 - RNA, 18 nt, synthetic construct
  source 1..18: mol_type = other RNA; note = PEgRNA spacer (TG;TGG PAM)
tgtcacactgaagtcctt

SEQ ID NO: 3563 - RNA, 19 nt, synthetic construct
  source 1..19: mol_type = other RNA; note = PEgRNA spacer (TG;TGG PAM)
gtgtcacactgaagtcctt

SEQ ID NO: 3564 - RNA, 20 nt, synthetic construct
  source 1..20: mol_type = other RNA; note = PEgRNA spacer (TG;TGG PAM)
ggtgtcacactgaagtcctt

SEQ ID NO: 3565 - RNA, 21 nt, synthetic construct
  source 1..21: mol_type = other RNA; note = PEgRNA spacer (TG;TGG PAM)
aggtgtcacactgaagtcctt

SEQ ID NO: 3566 - RNA, 22 nt, synthetic construct
  source 1..22: mol_type = other RNA; note = PEgRNA spacer (TG;TGG PAM)
caggtgtcacactgaagtcctt

SEQ ID NO: 3567 - RNA, 23 nt, synthetic construct
  source 1..23: mol_type = other RNA; note = RTT*1,2,4,7,8
tgagtgcaaaaaagaagccaaag

SEQ ID NO: 3568 - RNA, 23 nt, synthetic construct
  source 1..23: mol_type = other RNA; note = RTT*1,2,6,7,8 (TGG-to-TAG;TG-to-TA PAM silencing edit)
tgagtgcaaaaaagaagctaaag

SEQ ID NO: 3569 - RNA, 24 nt, synthetic construct
  source 1..24: mol_type = other RNA; note = RTT*1,2,4,7,8
gtgagtgcaaaaaagaagccaaag

SEQ ID NO: 3570 - RNA, 24 nt, synthetic construct
  source 1..24: mol_type = other RNA; note = RTT*1,2,6,7,8 (TGG-to-TAG;TG-to-TA PAM silencing edit)
gtgagtgcaaaaaagaagctaaag

SEQ ID NO: 3571 - RNA, 25 nt, synthetic construct
  source 1..25: mol_type = other RNA; note = RTT*1,2,4,7,8
tgtgagtgcaaaaaagaagccaaag

SEQ ID NO: 3572 - RNA, 25 nt, synthetic construct
  source 1..25: mol_type = other RNA; note = RTT*1,2,6,7,8 (TGG-to-TAG;TG-to-TA PAM silencing edit)
tgtgagtgcaaaaaagaagctaaag

SEQ ID NO: 3573 - RNA, 26 nt, synthetic construct
  source 1..26: mol_type = other RNA; note = RTT*1,2,3,7,8 (TG-to-TT;TGG-to-TTG PAM silencing edit)
gtgtgagtgcaaaaaagaagcaaaag

SEQ ID NO: 3574 - RNA, 26 nt, synthetic construct
  source 1..26: mol_type = other RNA; note = RTT*1,2,4,7,8
gtgtgagtgcaaaaaagaagccaaag

SEQ ID NO: 3575 - RNA, 26 nt, synthetic construct
  source 1..26: mol_type = other RNA; note = RTT*1,2,5,7,8 (TGG-to-TCG;TG-to-TC PAM silencing edit)
gtgtgagtgcaaaaaagaagcgaaag

SEQ ID NO: 3576 - RNA, 26 nt, synthetic construct
  source 1..26: mol_type = other RNA; note = RTT*1,2,6,7,8 (TGG-to-TAG;TG-to-TA PAM silencing edit)
gtgtgagtgcaaaaaagaagctaaag

SEQ ID NO: 3577 - RNA, 27 nt, synthetic construct
  source 1..27: mol_type = other RNA; note = RTT*1,2,3,7,8 (TG-to-TT;TGG-to-TTG PAM silencing edit)
agtgtgagtgcaaaaaagaagcaaaag

SEQ ID NO: 3578 - RNA, 27 nt, synthetic construct
  source 1..27: mol_type = other RNA; note = RTT*1,2,4,7,8
agtgtgagtgcaaaaaagaagccaaag

SEQ ID NO: 3579 - RNA, 27 nt, synthetic construct
  source 1..27: mol_type = other RNA; note = RTT*1,2,5,7,8 (TGG-to-TCG;TG-to-TC PAM silencing edit)
agtgtgagtgcaaaaaagaagcgaaag

SEQ ID NO: 3580 - RNA, 27 nt, synthetic construct
  source 1..27: mol_type = other RNA; note = RTT*1,2,6,7,8 (TGG-to-TAG;TG-to-TA PAM silencing edit)
agtgtgagtgcaaaaaagaagctaaag

SEQ ID NO: 3581 - RNA, 28 nt, synthetic construct
  source 1..28: mol_type = other RNA; note = RTT*1,2,3,7,8 (TG-to-TT;TGG-to-TTG PAM silencing edit)
cagtgtgagtgcaaaaaagaagcaaaag

SEQ ID NO: 3582 - RNA, 28 nt, synthetic construct
  source 1..28: mol_type = other RNA; note = RTT*1,2,4,7,8
cagtgtgagtgcaaaaaagaagccaaag

SEQ ID NO: 3583 - RNA, 28 nt, synthetic construct
  source 1..28: mol_type = other RNA; note = RTT*1,2,5,7,8 (TGG-to-TCG;TG-to-TC PAM silencing edit)
cagtgtgagtgcaaaaaagaagcgaaag

SEQ ID NO: 3584 - RNA, 28 nt, synthetic construct
  source 1..28: mol_type = other RNA; note = RTT*1,2,6,7,8 (TGG-to-TAG;TG-to-TA PAM silencing edit)
cagtgtgagtgcaaaaaagaagctaaag

SEQ ID NO: 3585 - RNA, 29 nt, synthetic construct
  source 1..29: mol_type = other RNA; note = RTT*1,2,3,7,8 (TG-to-TT;TGG-to-TTG PAM silencing edit)
gcagtgtgagtgcaaaaaagaagcaaaag

SEQ ID NO: 3586 - RNA, 29 nt, synthetic construct
  source 1..29: mol_type = other RNA; note = RTT*1,2,4,7,8
gcagtgtgagtgcaaaaaagaagccaaag

SEQ ID NO: 3587 - RNA, 29 nt, synthetic construct
  source 1..29: mol_type = other RNA; note = RTT*1,2,5,7,8 (TGG-to-TCG;TG-to-TC PAM silencing edit)
gcagtgtgagtgcaaaaaagaagcgaaag

SEQ ID NO: 3588 - RNA, 29 nt, synthetic construct
  source 1..29: mol_type = other RNA; note = RTT*1,2,6,7,8 (TGG-to-TAG;TG-to-TA PAM silencing edit)
gcagtgtgagtgcaaaaaagaagctaaag

SEQ ID NO: 3589 - RNA, 30 nt, synthetic construct
  source 1..30: mol_type = other RNA; note = RTT*1,2,3,7,8 (TG-to-TT;TGG-to-TTG PAM silencing edit)
ggcagtgtgagtgcaaaaaagaagcaaaag

SEQ ID NO: 3590 - RNA, 30 nt, synthetic construct
  source 1..30: mol_type = other RNA; note = RTT*1,2,4,7,8
ggcagtgtgagtgcaaaaaagaagccaaag

SEQ ID NO: 3591 - RNA, 30 nt, synthetic construct
  source 1..30: mol_type = other RNA; note = RTT*1,2,5,7,8 (TGG-to-TCG;TG-to-TC PAM silencing edit)
ggcagtgtgagtgcaaaaaagaagcgaaag

SEQ ID NO: 3592 - RNA, 30 nt, synthetic construct
  source 1..30: mol_type = other RNA; note = RTT*1,2,6,7,8 (TGG-to-TAG;TG-to-TA PAM silencing edit)
ggcagtgtgagtgcaaaaaagaagctaaag

SEQ ID NO: 3593 - RNA, 31 nt, synthetic construct
  source 1..31: mol_type = other RNA; note = RTT*1,2,3,7,8 (TG-to-TT;TGG-to-TTG PAM silencing edit)
gggcagtgtgagtgcaaaaaagaagcaaaag

SEQ ID NO: 3594 - RNA, 31 nt, synthetic construct
  source 1..31: mol_type = other RNA; note = RTT*1,2,4,7,8
gggcagtgtgagtgcaaaaaagaagccaaag

SEQ ID NO: 3595 - RNA, 31 nt, synthetic construct
  source 1..31: mol_type = other RNA; note = RTT*1,2,5,7,8 (TGG-to-TCG;TG-to-TC PAM silencing edit)
gggcagtgtgagtgcaaaaaagaagcgaaag

SEQ ID NO: 3596 - RNA, 31 nt, synthetic construct
  source 1..31: mol_type = other RNA; note = RTT*1,2,6,7,8 (TGG-to-TAG;TG-to-TA PAM silencing edit)
gggcagtgtgagtgcaaaaaagaagctaaag

SEQ ID NO: 3597 - RNA, 32 nt, synthetic construct
  source 1..32: mol_type = other RNA; note = RTT*1,2,3,7,8 (TG-to-TT;TGG-to-TTG PAM silencing edit)
tgggcagtgtgagtgcaaaaaagaagcaaaag

SEQ ID NO: 3598 - RNA, 32 nt, synthetic construct
  source 1..32: mol_type = other RNA; note = RTT*1,2,4,7,8
tgggcagtgtgagtgcaaaaaagaagccaaag

SEQ ID NO: 3599 - RNA, 32 nt, synthetic construct
  source 1..32: mol_type = other RNA; note = RTT*1,2,5,7,8 (TGG-to-TCG;TG-to-TC PAM silencing edit)
tgggcagtgtgagtgcaaaaaagaagcgaaag

SEQ ID NO: 3600 - RNA, 32 nt, synthetic construct
  source 1..32: mol_type = other RNA; note = RTT*1,2,6,7,8 (TGG-to-TAG;TG-to-TA PAM silencing edit)
tgggcagtgtgagtgcaaaaaagaagctaaag

SEQ ID NO: 3601 - RNA, 33 nt, synthetic construct
  source 1..33: mol_type = other RNA; note = RTT*1,2,3,7,8 (TG-to-TT;TGG-to-TTG PAM silencing edit)
ctgggcagtgtgagtgcaaaaaagaagcaaaag

SEQ ID NO: 3602 - RNA, 33 nt, synthetic construct
  source 1..33: mol_type = other RNA; note = RTT*1,2,4,7,8
ctgggcagtgtgagtgcaaaaaagaagccaaag

SEQ ID NO: 3603 - RNA, 33 nt, synthetic construct
  source 1..33: mol_type = other RNA; note = RTT*1,2,5,7,8 (TGG-to-TCG;TG-to-TC PAM silencing edit)
ctgggcagtgtgagtgcaaaaaagaagcgaaag

SEQ ID NO: 3604 - RNA, 33 nt, synthetic construct
  source 1..33: mol_type = other RNA; note = RTT*1,2,6,7,8 (TGG-to-TAG;TG-to-TA PAM silencing edit)
ctgggcagtgtgagtgcaaaaaagaagctaaag

SEQ ID NO: 3605 - RNA, 34 nt, synthetic construct
  source 1..34: mol_type = other RNA; note = RTT*1,2,3,7,8 (TG-to-TT;TGG-to-TTG PAM silencing edit)
tctgggcagtgtgagtgcaaaaaagaagcaaaag

SEQ ID NO: 3606 - RNA, 34 nt, synthetic construct
  source 1..34: mol_type = other RNA; note = RTT*1,2,4,7,8
tctgggcagtgtgagtgcaaaaaagaagccaaag

SEQ ID NO: 3607 - RNA, 34 nt, synthetic construct
  source 1..34: mol_type = other RNA; note = RTT*1,2,5,7,8 (TGG-to-TCG;TG-to-TC PAM silencing edit)
tctgggcagtgtgagtgcaaaaaagaagcgaaag

SEQ ID NO: 3608 - RNA, 34 nt, synthetic construct
  source 1..34: mol_type = other RNA; note = RTT*1,2,6,7,8 (TGG-to-TAG;TG-to-TA PAM silencing edit)
tctgggcagtgtgagtgcaaaaaagaagctaaag

SEQ ID NO: 3609 - RNA, 35 nt, synthetic construct
  source 1..35: mol_type = other RNA; note = RTT*1,2,3,7,8 (TG-to-TT;TGG-to-TTG PAM silencing edit)
ctctgggcagtgtgagtgcaaaaaagaagcaaaag

SEQ ID NO: 3610 - RNA, 35 nt, synthetic construct
  source 1..35: mol_type = other RNA; note = RTT*1,2,4,7,8
ctctgggcagtgtgagtgcaaaaaagaagccaaag

SEQ ID NO: 3611 - RNA, 35 nt, synthetic construct
  source 1..35: mol_type = other RNA; note = RTT*1,2,5,7,8 (TGG-to-TCG;TG-to-TC PAM silencing edit)
ctctgggcagtgtgagtgcaaaaaagaagcgaaag

SEQ ID NO: 3612 - RNA, 35 nt, synthetic construct
  source 1..35: mol_type = other RNA; note = RTT*1,2,6,7,8 (TGG-to-TAG;TG-to-TA PAM silencing edit)
ctctgggcagtgtgagtgcaaaaaagaagctaaag

SEQ ID NO: 3613 - RNA, 36 nt, synthetic construct
  source 1..36: mol_type = other RNA; note = RTT*1,2,3,7,8 (TG-to-TT;TGG-to-TTG PAM silencing edit)
actctgggcagtgtgagtgcaaaaaagaagcaaaag

SEQ ID NO: 3614 - RNA, 36 nt, synthetic construct
  source 1..36: mol_type = other RNA; note = RTT*1,2,4,7,8
actctgggcagtgtgagtgcaaaaaagaagccaaag

SEQ ID NO: 3615 - RNA, 36 nt, synthetic construct
  source 1..36: mol_type = other RNA; note = RTT*1,2,5,7,8 (TGG-to-TCG;TG-to-TC PAM silencing edit)
actctgggcagtgtgagtgcaaaaaagaagcgaaag

SEQ ID NO: 3616 - RNA, 36 nt, synthetic construct
  source 1..36: mol_type = other RNA; note = RTT*1,2,6,7,8 (TGG-to-TAG;TG-to-TA PAM silencing edit)
actctgggcagtgtgagtgcaaaaaagaagctaaag

SEQ ID NO: 3617 - RNA, 37 nt, synthetic construct
  source 1..37: mol_type = other RNA; note = RTT*1,2,3,7,8 (TG-to-TT;TGG-to-TTG PAM silencing edit)
cactctgggcagtgtgagtgcaaaaaagaagcaaaag

SEQ ID NO: 3618 - RNA, 37 nt, synthetic construct
  source 1..37: mol_type = other RNA; note = RTT*1,2,4,7,8
cactctgggcagtgtgagtgcaaaaaagaagccaaag

SEQ ID NO: 3619 - RNA, 37 nt, synthetic construct
  source 1..37: mol_type = other RNA; note = RTT*1,2,5,7,8 (TGG-to-TCG;TG-to-TC PAM silencing edit)
cactctgggcagtgtgagtgcaaaaaagaagcgaaag

SEQ ID NO: 3620 - RNA, 37 nt, synthetic construct
  source 1..37: mol_type = other RNA; note = RTT*1,2,6,7,8 (TGG-to-TAG;TG-to-TA PAM silencing edit)
cactctgggcagtgtgagtgcaaaaaagaagctaaag

SEQ ID NO: 3621 - RNA, 38 nt, synthetic construct
  source 1..38: mol_type = other RNA; note = RTT*1,2,3,7,8 (TG-to-TT;TGG-to-TTG PAM silencing edit)
tcactctgggcagtgtgagtgcaaaaaagaagcaaaag

SEQ ID NO: 3622 - RNA, 38 nt, synthetic construct
  source 1..38: mol_type = other RNA; note = RTT*1,2,4,7,8
tcactctgggcagtgtgagtgcaaaaaagaagccaaag

SEQ ID NO: 3623 - RNA, 38 nt, synthetic construct
  source 1..38: mol_type = other RNA; note = RTT*1,2,5,7,8 (TGG-to-TCG;TG-to-TC PAM silencing edit)
tcactctgggcagtgtgagtgcaaaaaagaagcgaaag

SEQ ID NO: 3624 - RNA, 38 nt, synthetic construct
  source 1..38: mol_type = other RNA; note = RTT*1,2,6,7,8 (TGG-to-TAG;TG-to-TA PAM silencing edit)
tcactctgggcagtgtgagtgcaaaaaagaagctaaag

SEQ ID NO: 3625 - RNA, 39 nt, synthetic construct
  source 1..39: mol_type = other RNA; note = RTT*1,2,3,7,8 (TG-to-TT;TGG-to-TTG PAM silencing edit)
ctcactctgggcagtgtgagtgcaaaaaagaagcaaaag

SEQ ID NO: 3626 - RNA, 39 nt, synthetic construct
  source 1..39: mol_type = other RNA; note = RTT*1,2,4,7,8
ctcactctgggcagtgtgagtgcaaaaaagaagccaaag

SEQ ID NO: 3627 - RNA, 39 nt, synthetic construct
  source 1..39: mol_type = other RNA; note = RTT*1,2,5,7,8 (TGG-to-TCG;TG-to-TC PAM silencing edit)
ctcactctgggcagtgtgagtgcaaaaaagaagcgaaag

SEQ ID NO: 3628 - RNA, 39 nt, synthetic construct
  source 1..39: mol_type = other RNA; note = RTT*1,2,6,7,8 (TGG-to-TAG;TG-to-TA PAM silencing edit)
ctcactctgggcagtgtgagtgcaaaaaagaagctaaag

SEQ ID NO: 3629 - RNA, 40 nt, synthetic construct
  source 1..40: mol_type = other RNA; note = RTT*1,2,3,7,8 (TG-to-TT;TGG-to-TTG PAM silencing edit)
cctcactctgggcagtgtgagtgcaaaaaagaagcaaaag

SEQ ID NO: 3630 - RNA, 40 nt, synthetic construct
  source 1..40: mol_type = other RNA; note = RTT*1,2,4,7,8
cctcactctgggcagtgtgagtgcaaaaaagaagccaaag

SEQ ID NO: 3631 - RNA, 40 nt, synthetic construct
  source 1..40: mol_type = other RNA; note = RTT*1,2,5,7,8 (TGG-to-TCG;TG-to-TC PAM silencing edit)
cctcactctgggcagtgtgagtgcaaaaaagaagcgaaag

SEQ ID NO: 3632 - RNA, 40 nt, synthetic construct
  source 1..40: mol_type = other RNA; note = RTT*1,2,6,7,8 (TGG-to-TAG;TG-to-TA PAM silencing edit)
cctcactctgggcagtgtgagtgcaaaaaagaagctaaag

SEQ ID NO: 3633 - RNA, 20 nt, synthetic construct
  source 1..20: mol_type = other RNA; note = PE3 ngRNA spacer (GG PAM)
agtgcaaaaaagaagcaaaa

SEQ ID NO: 3634 - RNA, 20 nt, synthetic construct
  source 1..20: mol_type = other RNA; note = PE3 ngRNA spacer (GG PAM)
agtgcaaaaaagaagcgaaa

SEQ ID NO: 3635 - RNA, 20 nt, synthetic construct
  source 1..20: mol_type = other RNA; note = PE3 ngRNA spacer (GG PAM)
agtgcaaaaaagaagctaaa

SEQ ID NO: 3636 - RNA, 20 nt, synthetic construct
  source 1..20: mol_type = other RNA; note = PE3b*3 ngRNA spacer (AG;AGG PAM)
gagtgcaaaaaagaagcaaa

SEQ ID NO: 3637 - RNA, 20 nt, synthetic construct
  source 1..20: mol_type = other RNA; note = PE3b*5 ngRNA spacer (AG;AGG PAM)
gagtgcaaaaaagaagcgaa

SEQ ID NO: 3638 - RNA, 20 nt, synthetic construct
  source 1..20: mol_type = other RNA; note = PE3b*6 ngRNA spacer (AG;AGG PAM)
gagtgcaaaaaagaagctaa

SEQ ID NO: 3639 - RNA, 130 nt, synthetic construct
  source 1..130: mol_type = other RNA; note = pegRNA
ggtgtcacactgaagtccttgttttagagctagaaatagcaagttaaaataaggctagtccgttatcaacttgaaaaagtggcaccgagtcggtgcgtgtgagtgcaaaaaagaagcaaaaggacttcag

SEQ ID NO: 3640 - RNA, 130 nt, synthetic construct
  source 1..130: mol_type = other RNA; note = pegRNA
ggtgtcacactgaagtccttgttttagagctagaaatagcaagttaaaataaggctagtccgttatcaacttgaaaaagtggcaccgagtcggtgcgtgtgagtgcaaaaaagaagccaaaggacttcag

SEQ ID NO: 3641 - RNA, 130 nt, synthetic construct
  source 1..130: mol_type = other RNA; note = pegRNA
ggtgtcacactgaagtccttgttttagagctagaaatagcaagttaaaataaggctagtccgttatcaacttgaaaaagtggcaccgagtcggtgcgtgtgagtgcaaaaaagaagcgaaaggacttcag

SEQ ID NO: 3642 - RNA, 130 nt, synthetic construct
  source 1..130: mol_type = other RNA; note = pegRNA
ggtgtcacactgaagtccttgttttagagctagaaatagcaagttaaaataaggctagtccgttatcaacttgaaaaagtggcaccgagtcggtgcgtgtgagtgcaaaaaagaagctaaaggacttcag

SEQ ID NO: 3643 - RNA, 131 nt, synthetic construct
  source 1..131: mol_type = other RNA; note = pegRNA
ggtgtcacactgaagtccttgttttagagctagaaatagcaagttaaaataaggctagtccgttatcaacttgaaaaagtggcaccgagtcggtgcagtgtgagtgcaaaaaagaagcaaaaggacttcag

SEQ ID NO: 3644 - RNA, 131 nt, synthetic construct
  source 1..131: mol_type = other RNA; note = pegRNA
ggtgtcacactgaagtccttgttttagagctagaaatagcaagttaaaataaggctagtccgttatcaacttgaaaaagtggcaccgagtcggtgcagtgtgagtgcaaaaaagaagcgaaaggacttcag

SEQ ID NO: 3645 - RNA, 131 nt, synthetic construct
  source 1..131: mol_type = other RNA; note = pegRNA
ggtgtcacactgaagtccttgttttagagctagaaatagcaagttaaaataaggctagtccgttatcaacttgaaaaagtggcaccgagtcggtgcagtgtgagtgcaaaaaagaagctaaaggacttcag

SEQ ID NO: 3646 - RNA, 131 nt, synthetic construct
  source 1..131: mol_type = other RNA; note = pegRNA
ggtgtcacactgaagtccttgttttagagctagaaatagcaagttaaaataaggctagtccgttatcaacttgaaaaagtggcaccgagtcggtgcgtgtgagtgcaaaaaagaagcaaaaggacttcagt

SEQ ID NO: 3647 - RNA, 131 nt, synthetic construct
  source 1..131: mol_type = other RNA; note = pegRNA
ggtgtcacactgaagtccttgttttagagctagaaatagcaagttaaaataaggctagtccgttatcaacttgaaaaagtggcaccgagtcggtgcgtgtgagtgcaaaaaagaagcgaaaggacttcagt

SEQ ID NO: 3648 - RNA, 131 nt, synthetic construct
  source 1..131: mol_type = other RNA; note = pegRNA
ggtgtcacactgaagtccttgttttagagctagaaatagcaagttaaaataaggctagtccgttatcaacttgaaaaagtggcaccgagtcggtgcgtgtgagtgcaaaaaagaagctaaaggacttcagt

SEQ ID NO: 3649 - RNA, 132 nt, synthetic construct
  source 1..132: mol_type = other RNA; note = pegRNA
ggtgtcacactgaagtccttgttttagagctagaaatagcaagttaaaataaggctagtccgttatcaacttgaaaaagtggcaccgagtcggtgcagtgtgagtgcaaaaaagaagcaaaaggacttcagt

SEQ ID NO: 3650 - RNA, 132 nt, synthetic construct
  source 1..132: mol_type = other RNA; note = pegRNA
ggtgtcacactgaagtccttgttttagagctagaaatagcaagttaaaataaggctagtccgttatcaacttgaaaaagtggcaccgagtcggtgcagtgtgagtgcaaaaaagaagcgaaaggacttcagt

SEQ ID NO: 3651 - RNA, 132 nt, synthetic construct
  source 1..132: mol_type = other RNA; note = pegRNA
ggtgtcacactgaagtccttgttttagagctagaaatagcaagttaaaataaggctagtccgttatcaacttgaaaaagtggcaccgagtcggtgcagtgtgagtgcaaaaaagaagctaaaggacttcagt

SEQ ID NO: 3652 - RNA, 132 nt, synthetic construct
  source 1..132: mol_type = other RNA; note = pegRNA
ggtgtcacactgaagtccttgttttagagctagaaatagcaagttaaaataaggctagtccgttatcaacttgaaaaagtggcaccgagtcggtgccagtgtgagtgcaaaaaagaagcaaaaggacttcag

SEQ ID NO: 3653 - RNA, 132 nt, synthetic construct
  source 1..132: mol_type = other RNA; note = pegRNA
ggtgtcacactgaagtccttgttttagagctagaaatagcaagttaaaataaggctagtccgttatcaacttgaaaaagtggcaccgagtcggtgccagtgtgagtgcaaaaaagaagcgaaaggacttcag

SEQ ID NO: 3654 - RNA, 132 nt, synthetic construct
  source 1..132: mol_type = other RNA; note = pegRNA
ggtgtcacactgaagtccttgttttagagctagaaatagcaagttaaaataaggctagtccgttatcaacttgaaaaagtggcaccgagtcggtgccagtgtgagtgcaaaaaagaagctaaaggacttcag

SEQ ID NO: 3655 - RNA, 132 nt, synthetic construct
  source 1..132: mol_type = other RNA; note = pegRNA
ggtgtcacactgaagtccttgttttagagctagaaatagcaagttaaaataaggctagtccgttatcaacttgaaaaagtggcaccgagtcggtgcgtgtgagtgcaaaaaagaagcaaaaggacttcagtg

SEQ ID NO: 3656 - RNA, 132 nt, synthetic construct
  source 1..132: mol_type = other RNA; note = pegRNA
ggtgtcacactgaagtccttgttttagagctagaaatagcaagttaaaataaggctagtccgttatcaacttgaaaaagtggcaccgagtcggtgcgtgtgagtgcaaaaaagaagccaaaggacttcagtg

SEQ ID NO: 3657 - RNA, 132 nt, synthetic construct
  source 1..132: mol_type = other RNA; note = pegRNA
ggtgtcacactgaagtccttgttttagagctagaaatagcaagttaaaataaggctagtccgttatcaacttgaaaaagtggcaccgagtcggtgcgtgtgagtgcaaaaaagaagcgaaaggacttcagtg

SEQ ID NO: 3658 - RNA, 132 nt, synthetic construct
  source 1..132: mol_type = other RNA; note = pegRNA
ggtgtcacactgaagtccttgttttagagctagaaatagcaagttaaaataaggctagtccgttatcaacttgaaaaagtggcaccgagtcggtgcgtgtgagtgcaaaaaagaagctaaaggacttcagtg

SEQ ID NO: 3659 - RNA, 133 nt, synthetic construct
  source 1..133: mol_type = other RNA; note = pegRNA
ggtgtcacactgaagtccttgttttagagctagaaatagcaagttaaaataaggctagtccgttatcaacttgaaaaagtggcaccgagtcggtgcagtgtgagtgcaaaaaagaagcaaaaggacttcagtg

SEQ ID NO: 3660 - RNA, 133 nt, synthetic construct
  source 1..133: mol_type = other RNA; note = pegRNA
ggtgtcacactgaagtccttgttttagagctagaaatagcaagttaaaataaggctagtccgttatcaacttgaaaaagtggcaccgagtcggtgcagtgtgagtgcaaaaaagaagcgaaaggacttcagtg

SEQ ID NO: 3661 - RNA, 133 nt, synthetic construct
  source 1..133: mol_type = other RNA; note = pegRNA
ggtgtcacactgaagtccttgttttagagctagaaatagcaagttaaaataaggctagtccgttatcaacttgaaaaagtggcaccgagtcggtgcagtgtgagtgcaaaaaagaagctaaaggacttcagtg

SEQ ID NO: 3662 - RNA, 133 nt, synthetic construct
  source 1..133: mol_type = other RNA; note = pegRNA
ggtgtcacactgaagtccttgttttagagctagaaatagcaagttaaaataaggctagtccgttatcaacttgaaaaagtggcaccgagtcggtgccagtgtgagtgcaaaaaagaagcaaaaggacttcagt

SEQ ID NO: 3663 - RNA, 133 nt, synthetic construct
  source 1..133: mol_type = other RNA; note = pegRNA
ggtgtcacactgaagtccttgttttagagctagaaatagcaagttaaaataaggctagtccgttatcaacttgaaaaagtggcaccgagtcggtgccagtgtgagtgcaaaaaagaagcgaaaggacttcagt

SEQ ID NO: 3664 - RNA, 133 nt, synthetic construct
  source 1..133: mol_type = other RNA; note = pegRNA
ggtgtcacactgaagtccttgttttagagctagaaatagcaagttaaaataaggctagtccgttatcaacttgaaaaagtggcaccgagtcggtgccagtgtgagtgcaaaaaagaagctaaaggacttcagt

SEQ ID NO: 3665 - RNA, 133 nt, synthetic construct
  source 1..133: mol_type = other RNA; note = pegRNA
ggtgtcacactgaagtccttgttttagagctagaaatagcaagttaaaataaggctagtccgttatcaacttgaaaaagtggcaccgagtcggtgcgcagtgtgagtgcaaaaaagaagcaaaaggacttcag

SEQ ID NO: 3666 - RNA, 133 nt, synthetic construct
  source 1..133: mol_type = other RNA; note = pegRNA
ggtgtcacactgaagtccttgttttagagctagaaatagcaagttaaaataaggctagtccgttatcaacttgaaaaagtggcaccgagtcggtgcgcagtgtgagtgcaaaaaagaagccaaaggacttcag

SEQ ID NO: 3667 - RNA, 133 nt, synthetic construct
  source 1..133: mol_type = other RNA; note = pegRNA
ggtgtcacactgaagtccttgttttagagctagaaatagcaagttaaaataaggctagtccgttatcaacttgaaaaagtggcaccgagtcggtgcgcagtgtgagtgcaaaaaagaagcgaaaggacttcag

SEQ ID NO: 3668 - RNA, 133 nt, synthetic construct
  source 1..133: mol_type = other RNA; note = pegRNA
ggtgtcacactgaagtccttgttttagagctagaaatagcaagttaaaataaggctagtccgttatcaacttgaaaaagtggcaccgagtcggtgcgcagtgtgagtgcaaaaaagaagctaaaggacttcag

SEQ ID NO: 3669 - RNA, 133 nt, synthetic construct
  source 1..133: mol_type = other RNA; note = pegRNA
ggtgtcacactgaagtccttgttttagagctagaaatagcaagttaaaataaggctagtccgttatcaacttgaaaaagtggcaccgagtcggtgcgtgtgagtgcaaaaaagaagcaaaaggacttcagtgt

SEQ ID NO: 3670 - RNA, 133 nt, synthetic construct
  source 1..133: mol_type = other RNA; note = pegRNA
ggtgtcacactgaagtccttgttttagagctagaaatagcaagttaaaataaggctagtccgttatcaacttgaaaaagtggcaccgagtcggtgcgtgtgagtgcaaaaaagaagcgaaaggacttcagtgt

SEQ ID NO: 3671 - RNA, 133 nt, synthetic construct
  source 1..133: mol_type = other RNA; note = pegRNA
ggtgtcacactgaagtccttgttttagagctagaaatagcaagttaaaataaggctagtccgttatcaacttgaaaaagtggcaccgagtcggtgcgtgtgagtgcaaaaaagaagctaaaggacttcagtgt

SEQ ID NO: 3672 - RNA, 134 nt, synthetic construct
  source 1..134: mol_type = other RNA; note = pegRNA
ggtgtcacactgaagtccttgttttagagctagaaatagcaagttaaaataaggctagtccgttatcaacttgaaaaagtggcaccgagtcggtgcagtgtgagtgcaaaaaagaagcaaaaggacttcagtgt

SEQ ID NO: 3673 - RNA, 134 nt, synthetic construct
  source 1..134: mol_type = other RNA; note = pegRNA
ggtgtcacactgaagtccttgttttagagctagaaatagcaagttaaaataaggctagtccgttatcaacttgaaaaagtggcaccgagtcggtgcagtgtgagtgcaaaaaagaagcgaaaggacttcagtgt

SEQ ID NO: 3674 - RNA, 134 nt, synthetic construct
  source 1..134: mol_type = other RNA; note = pegRNA
ggtgtcacactgaagtccttgttttagagctagaaatagcaagttaaaataaggctagtccgttatcaacttgaaaaagtggcaccgagtcggtgcagtgtgagtgcaaaaaagaagctaaaggacttcagtgt

SEQ ID NO: 3675 - RNA, 134 nt, synthetic construct
  source 1..134: mol_type = other RNA; note = pegRNA
ggtgtcacactgaagtccttgttttagagctagaaatagcaagttaaaataaggctagtccgttatcaacttgaaaaagtggcaccgagtcggtgccagtgtgagtgcaaaaaagaagcaaaaggacttcagtg

SEQ ID NO: 3676 - RNA, 134 nt, synthetic construct
  source 1..134: mol_type = other RNA; note = pegRNA
ggtgtcacactgaagtccttgttttagagctagaaatagcaagttaaaataaggctagtccgttatcaacttgaaaaagtggcaccgagtcggtgccagtgtgagtgcaaaaaagaagcgaaaggacttcagtg

SEQ ID NO: 3677 - RNA, 134 nt, synthetic construct
  source 1..134: mol_type = other RNA; note = pegRNA
ggtgtcacactgaagtccttgttttagagctagaaatagcaagttaaaataaggctagtccgttatcaacttgaaaaagtggcaccgagtcggtgccagtgtgagtgcaaaaaagaagctaaaggacttcagtg

SEQ ID NO: 3678 - RNA, 134 nt, synthetic construct
  source 1..134: mol_type = other RNA; note = pegRNA
ggtgtcacactgaagtccttgttttagagctagaaatagcaagttaaaataaggctagtccgttatcaacttgaaaaagtggcaccgagtcggtgcgcagtgtgagtgcaaaaaagaagcaaaaggacttcagt

SEQ ID NO: 3679 - RNA, 134 nt, synthetic construct
  source 1..134: mol_type = other RNA; note = pegRNA
ggtgtcacactgaagtccttgttttagagctagaaatagcaagttaaaataaggctagtccgttatcaacttgaaaaagtggcaccgagtcggtgcgcagtgtgagtgcaaaaaagaagcgaaaggacttcagt

SEQ ID NO: 3680 - RNA, 134 nt, synthetic construct
  source 1..134: mol_type = other RNA; note = pegRNA
ggtgtcacactgaagtccttgttttagagctagaaatagcaagttaaaataaggctagtccgttatcaacttgaaaaagtggcaccgagtcggtgcgcagtgtgagtgcaaaaaagaagctaaaggacttcagt

SEQ ID NO: 3681 - RNA, 134 nt, synthetic construct
  source 1..134: mol_type = other RNA; note = pegRNA
ggtgtcacactgaagtccttgttttagagctagaaatagcaagttaaaataaggctagtccgttatcaacttgaaaaagtggcaccgagtcggtgcggcagtgtgagtgcaaaaaagaagcaaaaggacttcag

SEQ ID NO: 3682 - RNA, 134 nt, synthetic construct
  source 1..134: mol_type = other RNA; note = pegRNA
ggtgtcacactgaagtccttgttttagagctagaaatagcaagttaaaataaggctagtccgttatcaacttgaaaaagtggcaccgagtcggtgcggcagtgtgagtgcaaaaaagaagccaaaggacttcag

SEQ ID NO: 3683 - RNA, 134 nt, synthetic construct
  source 1..134: mol_type = other RNA; note = pegRNA
ggtgtcacactgaagtccttgttttagagctagaaatagcaagttaaaataaggctagtccgttatcaacttgaaaaagtggcaccgagtcggtgcggcagtgtgagtgcaaaaaagaagcgaaaggacttcag

SEQ ID NO: 3684 - RNA, 134 nt, synthetic construct
  source 1..134: mol_type = other RNA; note = pegRNA
ggtgtcacactgaagtccttgttttagagctagaaatagcaagttaaaataaggctagtccgttatcaacttgaaaaagtggcaccgagtcggtgcggcagtgtgagtgcaaaaaagaagctaaaggacttcag

SEQ ID NO: 3685 - RNA, 134 nt, synthetic construct
  source 1..134: mol_type = other RNA; note = pegRNA
ggtgtcacactgaagtccttgttttagagctagaaatagcaagttaaaataaggctagtccgttatcaacttgaaaaagtggcaccgagtcggtgcgtgtgagtgcaaaaaagaagcaaaaggacttcagtgtg

SEQ ID NO: 3686 - RNA, 134 nt, synthetic construct
  source 1..134: mol_type = other RNA; note = pegRNA
ggtgtcacactgaagtccttgttttagagctagaaatagcaagttaaaataaggctagtccgttatcaacttgaaaaagtggcaccgagtcggtgcgtgtgagtgcaaaaaagaagcaaaaggacttcagtttt

SEQ ID NO: 3687 - RNA, 134 nt, synthetic construct
  source 1..134: mol_type = other RNA; note = pegRNA
ggtgtcacactgaagtccttgttttagagctagaaatagcaagttaaaataaggctagtccgttatcaacttgaaaaagtggcaccgagtcggtgcgtgtgagtgcaaaaaagaagccaaaggacttcagtgtg

SEQ ID NO: 3688 - RNA, 134 nt, synthetic construct
  source 1..134: mol_type = other RNA; note = pegRNA
ggtgtcacactgaagtccttgttttagagctagaaatagcaagttaaaataaggctagtccgttatcaacttgaaaaagtggcaccgagtcggtgcgtgtgagtgcaaaaaagaagccaaaggacttcagtttt

SEQ ID NO: 3689 - RNA, 134 nt, synthetic construct
  source 1..134: mol_type = other RNA; note = pegRNA
ggtgtcacactgaagtccttgttttagagctagaaatagcaagttaaaataaggctagtccgttatcaacttgaaaaagtggcaccgagtcggtgcgtgtgagtgcaaaaaagaagcgaaaggacttcagtgtg

SEQ ID NO: 3690 - RNA, 134 nt, synthetic construct
  source 1..134: mol_type = other RNA; note = pegRNA
ggtgtcacactgaagtccttgttttagagctagaaatagcaagttaaaataaggctagtccgttatcaacttgaaaaagtggcaccgagtcggtgcgtgtgagtgcaaaaaagaagcgaaaggacttcagtttt

SEQ ID NO: 3691 - RNA, 134 nt, synthetic construct
  source 1..134: mol_type = other RNA; note = pegRNA
ggtgtcacactgaagtccttgttttagagctagaaatagcaagttaaaataaggctagtccgttatcaacttgaaaaagtggcaccgagtcggtgcgtgtgagtgcaaaaaagaagctaaaggacttcagtgtg

SEQ ID NO: 3692 - RNA, 134 nt, synthetic construct
  source 1..134: mol_type = other RNA; note = pegRNA
ggtgtcacactgaagtccttgttttagagctagaaatagcaagttaaaataaggctagtccgttatcaacttgaaaaagtggcaccgagtcggtgcgtgtgagtgcaaaaaagaagctaaaggacttcagtttt

SEQ ID NO: 3693 - RNA, 135 nt, synthetic construct
  source 1..135: mol_type = other RNA; note = pegRNA
ggtgtcacactgaagtccttgttttagagctagaaatagcaagttaaaataaggctagtccgttatcaacttgaaaaagtggcaccgagtcggtgcagtgtgagtgcaaaaaagaagcaaaaggacttcagtgtg

SEQ ID NO: 3694 - RNA, 135 nt, synthetic construct
  source 1..135: mol_type = other RNA; note = pegRNA
ggtgtcacactgaagtccttgttttagagctagaaatagcaagttaaaataaggctagtccgttatcaacttgaaaaagtggcaccgagtcggtgcagtgtgagtgcaaaaaagaagcaaaaggacttcagtttt

SEQ ID NO: 3695 - RNA, 135 nt, synthetic construct
  source 1..135: mol_type = other RNA; note = pegRNA
ggtgtcacactgaagtccttgttttagagctagaaatagcaagttaaaataaggctagtccgttatcaacttgaaaaagtggcaccgagtcggtgcagtgtgagtgcaaaaaagaagcgaaaggacttcagtgtg

SEQ ID NO: 3696 - RNA, 135 nt, synthetic construct
  source 1..135: mol_type = other RNA; note = pegRNA
ggtgtcacactgaagtccttgttttagagctagaaatagcaagttaaaataaggctagtccgttatcaacttgaaaaagtggcaccgagtcggtgcagtgtgagtgcaaaaaagaagcgaaaggacttcagtttt

SEQ ID NO: 3697 - RNA, 135 nt, synthetic construct
  source 1..135: mol_type = other RNA; note = pegRNA
ggtgtcacactgaagtccttgttttagagctagaaatagcaagttaaaataaggctagtccgttatcaacttgaaaaagtggcaccgagtcggtgcagtgtgagtgcaaaaaagaagctaaaggacttcagtgtg

SEQ ID NO: 3698 - RNA, 135 nt, synthetic construct
  source 1..135: mol_type = other RNA; note = pegRNA
ggtgtcacactgaagtccttgttttagagctagaaatagcaagttaaaataaggctagtccgttatcaacttgaaaaagtggcaccgagtcggtgcagtgtgagtgcaaaaaagaagctaaaggacttcagtttt

SEQ ID NO: 3699 - RNA, 135 nt, synthetic construct
  source 1..135: mol_type = other RNA; note = pegRNA
ggtgtcacactgaagtccttgttttagagctagaaatagcaagttaaaataaggctagtccgttatcaacttgaaaaagtggcaccgagtcggtgccagtgtgagtgcaaaaaagaagcaaaaggacttcagtgt

SEQ ID NO: 3700 - RNA, 135 nt, synthetic construct
  source 1..135: mol_type = other RNA; note = pegRNA
ggtgtcacactgaagtccttgttttagagctagaaatagcaagttaaaataaggctagtccgttatcaacttgaaaaagtggcaccgagtcggtgccagtgtgagtgcaaaaaagaagcgaaaggacttcagtgt

SEQ ID NO: 3701 - RNA, 135 nt, synthetic construct
  source 1..135: mol_type = other RNA; note = pegRNA
ggtgtcacactgaagtccttgttttagagctagaaatagcaagttaaaataaggctagtccgttatcaacttgaaaaagtggcaccgagtcggtgccagtgtgagtgcaaaaaagaagctaaaggacttcagtgt

SEQ ID NO: 3702 - RNA, 135 nt, synthetic construct
  source 1..135: mol_type = other RNA; note = pegRNA
ggtgtcacactgaagtccttgttttagagctagaaatagcaagttaaaataaggctagtccgttatcaacttgaaaaagtggcaccgagtcggtgcgcagtgtgagtgcaaaaaagaagcaaaaggacttcagtg

SEQ ID NO: 3703 - RNA, 135 nt, synthetic construct
  source 1..135: mol_type = other RNA; note = pegRNA
ggtgtcacactgaagtccttgttttagagctagaaatagcaagttaaaataaggctagtccgttatcaacttgaaaaagtggcaccgagtcggtgcgcagtgtgagtgcaaaaaagaagccaaaggacttcagtg

SEQ ID NO: 3704 - RNA, 135 nt, synthetic construct
  source 1..135: mol_type = other RNA; note = pegRNA
ggtgtcacactgaagtccttgttttagagctagaaatagcaagttaaaataaggctagtccgttatcaacttgaaaaagtggcaccgagtcggtgcgcagtgtgagtgcaaaaaagaagcgaaaggacttcagtg

SEQ ID NO: 3705 - RNA, 135 nt, synthetic construct
  source 1..135: mol_type = other RNA; note = pegRNA
ggtgtcacactgaagtccttgttttagagctagaaatagcaagttaaaataaggctagtccgttatcaacttgaaaaagtggcaccgagtcggtgcgcagtgtgagtgcaaaaaagaagctaaaggacttcagtg

SEQ ID NO: 3706 - RNA, 135 nt, synthetic construct
  source 1..135: mol_type = other RNA; note = pegRNA
ggtgtcacactgaagtccttgttttagagctagaaatagcaagttaaaataaggctagtccgttatcaacttgaaaaagtggcaccgagtcggtgcggcagtgtgagtgcaaaaaagaagcaaaaggacttcagt

SEQ ID NO: 3707 - RNA, 135 nt, synthetic construct
  source 1..135: mol_type = other RNA; note = pegRNA
ggtgtcacactgaagtccttgttttagagctagaaatagcaagttaaaataaggctagtccgttatcaacttgaaaaagtggcaccgagtcggtgcggcagtgtgagtgcaaaaaagaagcgaaaggacttcagt

SEQ ID NO: 3708 - RNA, 135 nt, synthetic construct
  source 1..135: mol_type = other RNA; note = pegRNA
ggtgtcacactgaagtccttgttttagagctagaaatagcaagttaaaataaggctagtccgttatcaacttgaaaaagtggcaccgagtcggtgcggcagtgtgagtgcaaaaaagaagctaaaggacttcagt

SEQ ID NO: 3709 - RNA, 135 nt, synthetic construct
  source 1..135: mol_type = other RNA; note = pegRNA
ggtgtcacactgaagtccttgttttagagctagaaatagcaagttaaaataaggctagtccgttatcaacttgaaaaagtggcaccgagtcggtgcgggcagtgtgagtgcaaaaaagaagcaaaaggacttcag

SEQ ID NO: 3710 - RNA, 135 nt, synthetic construct
  source 1..135: mol_type = other RNA; note = pegRNA
ggtgtcacactgaagtccttgttttagagctagaaatagcaagttaaaataaggctagtccgttatcaacttgaaaaagtggcaccgagtcggtgcgggcagtgtgagtgcaaaaaagaagcgaaaggacttcag

SEQ ID NO: 3711 - RNA, 135 nt, synthetic construct
  source 1..135: mol_type = other RNA; note = pegRNA
ggtgtcacactgaagtccttgttttagagctagaaatagcaagttaaaataaggctagtccgttatcaacttgaaaaagtggcaccgagtcggtgcgggcagtgtgagtgcaaaaaagaagctaaaggacttcag

SEQ ID NO: 3712 - RNA, 135 nt, synthetic construct
  source 1..135: mol_type = other RNA; note = pegRNA
ggtgtcacactgaagtccttgttttagagctagaaatagcaagttaaaataaggctagtccgttatcaacttgaaaaagtggcaccgagtcggtgcgtgtgagtgcaaaaaagaagcaaaaggacttcagtgtga

SEQ ID NO: 3713 - RNA, 135 nt, synthetic construct
  source 1..135: mol_type = other RNA; note = pegRNA
ggtgtcacactgaagtccttgttttagagctagaaatagcaagttaaaataaggctagtccgttatcaacttgaaaaagtggcaccgagtcggtgcgtgtgagtgcaaaaaagaagcaaaaggacttcagttttt

SEQ ID NO: 3714 - RNA, 135 nt, synthetic construct
  source 1..135: mol_type = other RNA; note = pegRNA
ggtgtcacactgaagtccttgttttagagctagaaatagcaagttaaaataaggctagtccgttatcaacttgaaaaagtggcaccgagtcggtgcgtgtgagtgcaaaaaagaagcgaaaggacttcagtgtga

SEQ ID NO: 3715 - RNA, 135 nt, synthetic construct
  source 1..135: mol_type = other RNA; note = pegRNA
ggtgtcacactgaagtccttgttttagagctagaaatagcaagttaaaataaggctagtccgttatcaacttgaaaaagtggcaccgagtcggtgcgtgtgagtgcaaaaaagaagcgaaaggacttcagttttt

SEQ ID NO: 3716 - RNA, 135 nt, synthetic construct
  source 1..135: mol_type = other RNA; note = pegRNA
ggtgtcacactgaagtccttgttttagagctagaaatagcaagttaaaataaggctagtccgttatcaacttgaaaaagtggcaccgagtcggtgcgtgtgagtgcaaaaaagaagctaaaggacttcagtgtga

SEQ ID NO: 3717 - RNA, 135 nt, synthetic construct
  source 1..135: mol_type = other RNA; note = pegRNA
ggtgtcacactgaagtccttgttttagagctagaaatagcaagttaaaataaggctagtccgttatcaacttgaaaaagtggcaccgagtcggtgcgtgtgagtgcaaaaaagaagctaaaggacttcagttttt

SEQ ID NO: 3718 - RNA, 136 nt, synthetic construct
  source 1..136: mol_type = other RNA; note = pegRNA
ggtgtcacactgaagtccttgttttagagctagaaatagcaagttaaaataaggctagtccgttatcaacttgaaaaagtggcaccgagtcggtgcagtgtgagtgcaaaaaagaagcaaaaggacttcagtgtga

SEQ ID NO: 3719 - RNA, 136 nt, synthetic construct
  source 1..136: mol_type = other RNA; note = pegRNA
ggtgtcacactgaagtccttgttttagagctagaaatagcaagttaaaataaggctagtccgttatcaacttgaaaaagtggcaccgagtcggtgcagtgtgagtgcaaaaaagaagcaaaaggacttcagttttt

SEQ ID NO: 3720 - RNA, 136 nt, synthetic construct
  source 1..136: mol_type = other RNA; note = pegRNA
ggtgtcacactgaagtccttgttttagagctagaaatagcaagttaaaataaggctagtccgttatcaacttgaaaaagtggcaccgagtcggtgcagtgtgagtgcaaaaaagaagcgaaaggacttcagtgtga

SEQ ID NO: 3721 - RNA, 136 nt, synthetic construct
  source 1..136: mol_type = other RNA; note = pegRNA
ggtgtcacactgaagtccttgttttagagctagaaatagcaagttaaaataaggctagtccgttatcaacttgaaaaagtggcaccgagtcggtgcagtgtgagtgcaaaaaagaagcgaaaggacttcagttttt

SEQ ID NO: 3722 - RNA, 136 nt, synthetic construct
  source 1..136: mol_type = other RNA; note = pegRNA
ggtgtcacactgaagtccttgttttagagctagaaatagcaagttaaaataaggctagtccgttatcaacttgaaaaagtggcaccgagtcggtgcagtgtgagtgcaaaaaagaagctaaaggacttcagtgtga

SEQ ID NO: 3723 - RNA, 136 nt, synthetic construct
  source 1..136: mol_type = other RNA; note = pegRNA
ggtgtcacactgaagtccttgttttagagctagaaatagcaagttaaaataaggctagtccgttatcaacttgaaaaagtggcaccgagtcggtgcagtgtgagtgcaaaaaagaagctaaaggacttcagttttt

SEQ ID NO: 3724 - RNA, 136 nt, synthetic construct
  source 1..136: mol_type = other RNA; note = pegRNA
ggtgtcacactgaagtccttgttttagagctagaaatagcaagttaaaataaggctagtccgttatcaacttgaaaaagtggcaccgagtcggtgccagtgtgagtgcaaaaaagaagcaaaaggacttcagtgtg

SEQ ID NO: 3725 - RNA, 136 nt, synthetic construct
  source 1..136: mol_type = other RNA; note = pegRNA
ggtgtcacactgaagtccttgttttagagctagaaatagcaagttaaaataaggctagtccgttatcaacttgaaaaagtggcaccgagtcggtgccagtgtgagtgcaaaaaagaagcaaaaggacttcagtttt

SEQ ID NO: 3726 - RNA, 136 nt, synthetic construct
  source 1..136: mol_type = other RNA; note = pegRNA
ggtgtcacactgaagtccttgttttagagctagaaatagcaagttaaaataaggctagtccgttatcaacttgaaaaagtggcaccgagtcggtgccagtgtgagtgcaaaaaagaagcgaaaggacttcagtgtg

SEQ ID NO: 3727 - RNA, 136 nt, synthetic construct
  source 1..136: mol_type = other RNA; note = pegRNA
ggtgtcacactgaagtccttgttttagagctagaaatagcaagttaaaataaggctagtccgttatcaacttgaaaaagtggcaccgagtcggtgccagtgtgagtgcaaaaaagaagcgaaaggacttcagtttt

SEQ ID NO: 3728 - RNA, 136 nt, synthetic construct
  source 1..136: mol_type = other RNA; note = pegRNA
ggtgtcacactgaagtccttgttttagagctagaaatagcaagttaaaataaggctagtccgttatcaacttgaaaaagtggcaccgagtcggtgccagtgtgagtgcaaaaaagaagctaaaggacttcagtgtg

SEQ ID NO: 3729 - RNA, 136 nt, synthetic construct
  source 1..136: mol_type = other RNA; note = pegRNA
ggtgtcacactgaagtccttgttttagagctagaaatagcaagttaaaataaggctagtccgttatcaacttgaaaaagtggcaccgagtcggtgccagtgtgagtgcaaaaaagaagctaaaggacttcagtttt

SEQ ID NO: 3730 - RNA, 136 nt, synthetic construct
  source 1..136: mol_type = other RNA; note = pegRNA
ggtgtcacactgaagtccttgttttagagctagaaatagcaagttaaaataaggctagtccgttatcaacttgaaaaagtggcaccgagtcggtgcgcagtgtgagtgcaaaaaagaagcaaaaggacttcagtgt

SEQ ID NO: 3731 - RNA, 136 nt, synthetic construct
  source 1..136: mol_type = other RNA; note = pegRNA
ggtgtcacactgaagtccttgttttagagctagaaatagcaagttaaaataaggctagtccgttatcaacttgaaaaagtggcaccgagtcggtgcgcagtgtgagtgcaaaaaagaagcgaaaggacttcagtgt

SEQ ID NO: 3732 - RNA, 136 nt, synthetic construct
  source 1..136: mol_type = other RNA; note = pegRNA
ggtgtcacactgaagtccttgttttagagctagaaatagcaagttaaaataaggctagtccgttatcaacttgaaaaagtggcaccgagtcggtgcgcagtgtgagtgcaaaaaagaagctaaaggacttcagtgt

SEQ ID NO: 3733 - RNA, 136 nt, synthetic construct
  source 1..136: mol_type = other RNA; note = pegRNA
ggtgtcacactgaagtccttgttttagagctagaaatagcaagttaaaataaggctagtccgttatcaacttgaaaaagtggcaccgagtcggtgcggcagtgtgagtgcaaaaaagaagcaaaaggacttcagtg

SEQ ID NO: 3734 - RNA, 136 nt, synthetic construct
  source 1..136: mol_type = other RNA; note = pegRNA
ggtgtcacactgaagtccttgttttagagctagaaatagcaagttaaaataaggctagtccgttatcaacttgaaaaagtggcaccgagtcggtgcggcagtgtgagtgcaaaaaagaagccaaaggacttcagtg

SEQ ID NO: 3735 - RNA, 136 nt, synthetic construct
  source 1..136: mol_type = other RNA; note = pegRNA
ggtgtcacactgaagtccttgttttagagctagaaatagcaagttaaaataaggctagtccgttatcaacttgaaaaagtggcaccgagtcggtgcggcagtgtgagtgcaaaaaagaagcgaaaggacttcagtg

SEQ ID NO: 3736 - RNA, 136 nt, synthetic construct
  source 1..136: mol_type = other RNA; note = pegRNA
ggtgtcacactgaagtccttgttttagagctagaaatagcaagttaaaataaggctagtccgttatcaacttgaaaaagtggcaccgagtcggtgcggcagtgtgagtgcaaaaaagaagctaaaggacttcagtg

SEQ ID NO: 3737 - RNA, 136 nt, synthetic construct
  source 1..136: mol_type = other RNA; note = pegRNA
ggtgtcacactgaagtccttgttttagagctagaaatagcaagttaaaataaggctagtccgttatcaacttgaaaaagtggcaccgagtcggtgcgggcagtgtgagtgcaaaaaagaagcaaaaggacttcagt

SEQ ID NO: 3738 - RNA, 136 nt, synthetic construct
  source 1..136: mol_type = other RNA; note = pegRNA
ggtgtcacactgaagtccttgttttagagctagaaatagcaagttaaaataaggctagtccgttatcaacttgaaaaagtggcaccgagtcggtgcgggcagtgtgagtgcaaaaaagaagcgaaaggacttcagt

SEQ ID NO: 3739 - RNA, 136 nt, synthetic construct
  source 1..136: mol_type = other RNA; note = pegRNA
ggtgtcacactgaagtccttgttttagagctagaaatagcaagttaaaataaggctagtccgttatcaacttgaaaaagtggcaccgagtcggtgcgggcagtgtgagtgcaaaaaagaagctaaaggacttcagt

SEQ ID NO: 3740 - RNA, 136 nt, synthetic construct
  source 1..136: mol_type = other RNA; note = pegRNA
ggtgtcacactgaagtccttgttttagagctagaaatagcaagttaaaataaggctagtccgttatcaacttgaaaaagtggcaccgagtcggtgcgtgtgagtgcaaaaaagaagcaaaaggacttcagtgtgac

SEQ ID NO: 3741 - RNA, 136 nt, synthetic construct
  source 1..136: mol_type = other RNA; note = pegRNA
ggtgtcacactgaagtccttgttttagagctagaaatagcaagttaaaataaggctagtccgttatcaacttgaaaaagtggcaccgagtcggtgcgtgtgagtgcaaaaaagaagcaaaaggacttcagtgtttt

SEQ ID NO: 3742 - RNA, 136 nt, synthetic construct
  source 1..136: mol_type = other RNA; note = pegRNA
ggtgtcacactgaagtccttgttttagagctagaaatagcaagttaaaataaggctagtccgttatcaacttgaaaaagtggcaccgagtcggtgcgtgtgagtgcaaaaaagaagccaaaggacttcagtgtgac

SEQ ID NO: 3743 - RNA, 136 nt, synthetic construct
  source 1..136: mol_type = other RNA; note = pegRNA
ggtgtcacactgaagtccttgttttagagctagaaatagcaagttaaaataaggctagtccgttatcaacttgaaaaagtggcaccgagtcggtgcgtgtgagtgcaaaaaagaagccaaaggacttcagtgtttt

SEQ ID NO: 3744 - RNA, 136 nt, synthetic construct
  source 1..136: mol_type = other RNA; note = pegRNA
ggtgtcacactgaagtccttgttttagagctagaaatagcaagttaaaataaggctagtccgttatcaacttgaaaaagtggcaccgagtcggtgcgtgtgagtgcaaaaaagaagcgaaaggacttcagtgtgac

SEQ ID NO: 3745 - RNA, 136 nt, synthetic construct
  source 1..136: mol_type = other RNA; note = pegRNA
ggtgtcacactgaagtccttgttttagagctagaaatagcaagttaaaataaggctagtccgttatcaacttgaaaaagtggcaccgagtcggtgcgtgtgagtgcaaaaaagaagcgaaaggacttcagtgtttt

SEQ ID NO: 3746 - RNA, 136 nt, synthetic construct
  source 1..136: mol_type = other RNA; note = pegRNA
ggtgtcacactgaagtccttgttttagagctagaaatagcaagttaaaataaggctagtccgttatcaacttgaaaaagtggcaccgagtcggtgcgtgtgagtgcaaaaaagaagctaaaggacttcagtgtgac

SEQ ID NO: 3747 - RNA, 136 nt, synthetic construct
  source 1..136: mol_type = other RNA; note = pegRNA
ggtgtcacactgaagtccttgttttagagctagaaatagcaagttaaaataaggctagtccgttatcaacttgaaaaagtggcaccgagtcggtgcgtgtgagtgcaaaaaagaagctaaaggacttcagtgtttt

SEQ ID NO: 3748 - RNA, 136 nt, synthetic construct
  source 1..136: mol_type = other RNA; note = pegRNA
ggtgtcacactgaagtccttgttttagagctagaaatagcaagttaaaataaggctagtccgttatcaacttgaaaaagtggcaccgagtcggtgctgggcagtgtgagtgcaaaaaagaagcaaaaggacttcag

SEQ ID NO: 3749 - RNA, 136 nt, synthetic construct
  source 1..136: mol_type = other RNA; note = pegRNA
ggtgtcacactgaagtccttgttttagagctagaaatagcaagttaaaataaggctagtccgttatcaacttgaaaaagtggcaccgagtcggtgctgggcagtgtgagtgcaaaaaagaagccaaaggacttcag

SEQ ID NO: 3750 - RNA, 136 nt, synthetic construct
  source 1..136: mol_type = other RNA; note = pegRNA
ggtgtcacactgaagtccttgttttagagctagaaatagcaagttaaaataaggctagtccgttatcaacttgaaaaagtggcaccgagtcggtgctgggcagtgtgagtgcaaaaaagaagcgaaaggacttcag

SEQ ID NO: 3751 - RNA, 136 nt, synthetic construct
  source 1..136: mol_type = other RNA; note = pegRNA
ggtgtcacactgaagtccttgttttagagctagaaatagcaagttaaaataaggctagtccgttatcaacttgaaaaagtggcaccgagtcggtgctgggcagtgtgagtgcaaaaaagaagctaaaggacttcag

SEQ ID NO: 3752 - RNA, 137 nt, synthetic construct
  source 1..137: mol_type = other RNA; note = pegRNA
ggtgtcacactgaagtccttgttttagagctagaaatagcaagttaaaataaggctagtccgttatcaacttgaaaaagtggcaccgagtcggtgcagtgtgagtgcaaaaaagaagcaaaaggacttcagtgtgac

SEQ ID NO: 3753 - RNA, 137 nt, synthetic construct
  source 1..137: mol_type = other RNA; note = pegRNA
ggtgtcacactgaagtccttgttttagagctagaaatagcaagttaaaataaggctagtccgttatcaacttgaaaaagtggcaccgagtcggtgcagtgtgagtgcaaaaaagaagcaaaaggacttcagtgtttt

SEQ ID NO: 3754 - RNA, 137 nt, synthetic construct
  source 1..137: mol_type = other RNA; note = pegRNA
ggtgtcacactgaagtccttgttttagagctagaaatagcaagttaaaataaggctagtccgttatcaacttgaaaaagtggcaccgagtcggtgcagtgtgagtgcaaaaaagaagcgaaaggacttcagtgtgac

SEQ ID NO: 3755 - RNA, 137 nt, synthetic construct
  source 1..137: mol_type = other RNA; note = pegRNA
ggtgtcacactgaagtccttgttttagagctagaaatagcaagttaaaataaggctagtccgttatcaacttgaaaaagtggcaccgagtcggtgcagtgtgagtgcaaaaaagaagcgaaaggacttcagtgtttt

SEQ ID NO: 3756 - RNA, 137 nt, synthetic construct
  source 1..137: mol_type = other RNA; note = pegRNA
ggtgtcacactgaagtccttgttttagagctagaaatagcaagttaaaataaggctagtccgttatcaacttgaaaaagtggcaccgagtcggtgcagtgtgagtgcaaaaaagaagctaaaggacttcagtgtgac

SEQ ID NO: 3757 - RNA, 137 nt, synthetic construct
  source 1..137: mol_type = other RNA; note = pegRNA
ggtgtcacactgaagtccttgttttagagctagaaatagcaagttaaaataaggctagtccgttatcaacttgaaaaagtggcaccgagtcggtgcagtgtgagtgcaaaaaagaagctaaaggacttcagtgtttt

SEQ ID NO: 3758 - RNA, 137 nt, synthetic construct
  source 1..137: mol_type = other RNA; note = pegRNA
ggtgtcacactgaagtccttgttttagagctagaaatagcaagttaaaataaggctagtccgttatcaacttgaaaaagtggcaccgagtcggtgccagtgtgagtgcaaaaaagaagcaaaaggacttcagtgtga

SEQ ID NO: 3759 - RNA, 137 nt, synthetic construct
  source 1..137: mol_type = other RNA; note = pegRNA
ggtgtcacactgaagtccttgttttagagctagaaatagcaagttaaaataaggctagtccgttatcaacttgaaaaagtggcaccgagtcggtgccagtgtgagtgcaaaaaagaagcaaaaggacttcagttttt

SEQ ID NO: 3760 - RNA, 137 nt, synthetic construct
  source 1..137: mol_type = other RNA; note = pegRNA
ggtgtcacactgaagtccttgttttagagctagaaatagcaagttaaaataaggctagtccgttatcaacttgaaaaagtggcaccgagtcggtgccagtgtgagtgcaaaaaagaagcgaaaggacttcagtgtga

SEQ ID NO: 3761 - RNA, 137 nt, synthetic construct
  source 1..137: mol_type = other RNA; note = pegRNA
ggtgtcacactgaagtccttgttttagagctagaaatagcaagttaaaataaggctagtccgttatcaacttgaaaaagtggcaccgagtcggtgccagtgtgagtgcaaaaaagaagcgaaaggacttcagttttt

SEQ ID NO: 3762 - RNA, 137 nt, synthetic construct
  source 1..137: mol_type = other RNA; note = pegRNA
ggtgtcacactgaagtccttgttttagagctagaaatagcaagttaaaataaggctagtccgttatcaacttgaaaaagtggcaccgagtcggtgccagtgtgagtgcaaaaaagaagctaaaggacttcagtgtga

SEQ ID NO: 3763 - RNA, 137 nt, synthetic construct
  source 1..137: mol_type = other RNA; note = pegRNA
ggtgtcacactgaagtccttgttttagagctagaaatagcaagttaaaataaggctagtccgttatcaacttgaaaaagtggcaccgagtcggtgccagtgtgagtgcaaaaaagaagctaaaggacttcagttttt

SEQ ID NO: 3764 - RNA, 137 nt, synthetic construct
  source 1..137: mol_type = other RNA; note = pegRNA
ggtgtcacactgaagtccttgttttagagctagaaatagcaagttaaaataaggctagtccgttatcaacttgaaaaagtggcaccgagtcggtgcctgggcagtgtgagtgcaaaaaagaagcaaaaggacttcag

SEQ ID NO: 3765 - RNA, 137 nt, synthetic construct
  source 1..137: mol_type = other RNA; note = pegRNA
ggtgtcacactgaagtccttgttttagagctagaaatagcaagttaaaataaggctagtccgttatcaacttgaaaaagtggcaccgagtcggtgcctgggcagtgtgagtgcaaaaaagaagcgaaaggacttcag

SEQ ID NO: 3766 - RNA, 137 nt, synthetic construct
  source 1..137: mol_type = other RNA; note = pegRNA
ggtgtcacactgaagtccttgttttagagctagaaatagcaagttaaaataaggctagtccgttatcaacttgaaaaagtggcaccgagtcggtgcctgggcagtgtgagtgcaaaaaagaagctaaaggacttcag

SEQ ID NO: 3767 - RNA, 137 nt, synthetic construct
  source 1..137: mol_type = other RNA; note = pegRNA
ggtgtcacactgaagtccttgttttagagctagaaatagcaagttaaaataaggctagtccgttatcaacttgaaaaagtggcaccgagtcggtgcgcagtgtgagtgcaaaaaagaagcaaaaggacttcagtgtg

SEQ ID NO: 3768 - RNA, 137 nt, synthetic construct
  source 1..137: mol_type = other RNA; note = pegRNA
ggtgtcacactgaagtccttgttttagagctagaaatagcaagttaaaataaggctagtccgttatcaacttgaaaaagtggcaccgagtcggtgcgcagtgtgagtgcaaaaaagaagcaaaaggacttcagtttt

SEQ ID NO: 3769 - RNA, 137 nt, synthetic construct
  source 1..137: mol_type = other RNA; note = pegRNA
ggtgtcacactgaagtccttgttttagagctagaaatagcaagttaaaataaggctagtccgttatcaacttgaaaaagtggcaccgagtcggtgcgcagtgtgagtgcaaaaaagaagccaaaggacttcagtgtg

SEQ ID NO: 3770 - RNA, 137 nt, synthetic construct
  source 1..137: mol_type = other RNA; note = pegRNA
ggtgtcacactgaagtccttgttttagagctagaaatagcaagttaaaataaggctagtccgttatcaacttgaaaaagtggcaccgagtcggtgcgcagtgtgagtgcaaaaaagaagccaaaggacttcagtttt

SEQ ID NO: 3771 - RNA, 137 nt, synthetic construct
  source 1..137: mol_type = other RNA; note = pegRNA
ggtgtcacactgaagtccttgttttagagctagaaatagcaagttaaaataaggctagtccgttatcaacttgaaaaagtggcaccgagtcggtgcgcagtgtgagtgcaaaaaagaagcgaaaggacttcagtgtg

SEQ ID NO: 3772 - RNA, 137 nt, synthetic construct
  source 1..137: mol_type = other RNA; note = pegRNA
ggtgtcacactgaagtccttgttttagagctagaaatagcaagttaaaataaggctagtccgttatcaacttgaaaaagtggcaccgagtcggtgcgcagtgtgagtgcaaaaaagaagcgaaaggacttcagtttt

SEQ ID NO: 3773 - RNA, 137 nt, synthetic construct
  source 1..137: mol_type = other RNA; note = pegRNA
ggtgtcacactgaagtccttgttttagagctagaaatagcaagttaaaataaggctagtccgttatcaacttgaaaaagtggcaccgagtcggtgcgcagtgtgagtgcaaaaaagaagctaaaggacttcagtgtg

SEQ ID NO: 3774 - RNA, 137 nt, synthetic construct
  source 1..137: mol_type = other RNA; note = pegRNA
ggtgtcacactgaagtccttgttttagagctagaaatagcaagttaaaataaggctagtccgttatcaacttgaaaaagtggcaccgagtcggtgcgcagtgtgagtgcaaaaaagaagctaaaggacttcagtttt

SEQ ID NO: 3775 - RNA, 137 nt, synthetic construct
  source 1..137: mol_type = other RNA; note = pegRNA
ggtgtcacactgaagtccttgttttagagctagaaatagcaagttaaaataaggctagtccgttatcaacttgaaaaagtggcaccgagtcggtgcggcagtgtgagtgcaaaaaagaagcaaaaggacttcagtgt

SEQ ID NO: 3776 - RNA, 137 nt, synthetic construct
  source 1..137: mol_type = other RNA; note = pegRNA
ggtgtcacactgaagtccttgttttagagctagaaatagcaagttaaaataaggctagtccgttatcaacttgaaaaagtggcaccgagtcggtgcggcagtgtgagtgcaaaaaagaagcgaaaggacttcagtgt

SEQ ID NO: 3777 - RNA, 137 nt, synthetic construct
  source 1..137: mol_type = other RNA; note = pegRNA
ggtgtcacactgaagtccttgttttagagctagaaatagcaagttaaaataaggctagtccgttatcaacttgaaaaagtggcaccgagtcggtgcggcagtgtgagtgcaaaaaagaagctaaaggacttcagtgt

SEQ ID NO: 3778 - RNA, 137 nt, synthetic construct
  source 1..137: mol_type = other RNA; note = pegRNA
ggtgtcacactgaagtccttgttttagagctagaaatagcaagttaaaataaggctagtccgttatcaacttgaaaaagtggcaccgagtcggtgcgggcagtgtgagtgcaaaaaagaagcaaaaggacttcagtg

SEQ ID NO: 3779 - RNA, 137 nt, synthetic construct
  source 1..137: mol_type = other RNA; note = pegRNA
ggtgtcacactgaagtccttgttttagagctagaaatagcaagttaaaataaggctagtccgttatcaacttgaaaaagtggcaccgagtcggtgcgggcagtgtgagtgcaaaaaagaagcgaaaggacttcagtg

SEQ ID NO: 3780 - RNA, 137 nt, synthetic construct
  source 1..137: mol_type = other RNA; note = pegRNA
ggtgtcacactgaagtccttgttttagagctagaaatagcaagttaaaataaggctagtccgttatcaacttgaaaaagtggcaccgagtcggtgcgggcagtgtgagtgcaaaaaagaagctaaaggacttcagtg

SEQ ID NO: 3781 - RNA, 137 nt, synthetic construct
  source 1..137: mol_type = other RNA; note = pegRNA
ggtgtcacactgaagtccttgttttagagctagaaatagcaagttaaaataaggctagtccgttatcaacttgaaaaagtggcaccgagtcggtgcgtgtgagtgcaaaaaagaagcaaaaggacttcagtgtgaca

SEQ ID NO: 3782 - RNA, 137 nt, synthetic construct
  source 1..137: mol_type = other RNA; note = pegRNA
ggtgtcacactgaagtccttgttttagagctagaaatagcaagttaaaataaggctagtccgttatcaacttgaaaaagtggcaccgagtcggtgcgtgtgagtgcaaaaaagaagcaaaaggacttcagtgttttt

SEQ ID NO: 3783 - RNA, 137 nt, synthetic construct
  source 1..137: mol_type = other RNA; note = pegRNA
ggtgtcacactgaagtccttgttttagagctagaaatagcaagttaaaataaggctagtccgttatcaacttgaaaaagtggcaccgagtcggtgcgtgtgagtgcaaaaaagaagcgaaaggacttcagtgtgaca

SEQ ID NO: 3784 - RNA, 137 nt, synthetic construct
  source 1..137: mol_type = other RNA; note = pegRNA
ggtgtcacactgaagtccttgttttagagctagaaatagcaagttaaaataaggctagtccgttatcaacttgaaaaagtggcaccgagtcggtgcgtgtgagtgcaaaaaagaagcgaaaggacttcagtgttttt

SEQ ID NO: 3785 - RNA, 137 nt, synthetic construct
  source 1..137: mol_type = other RNA; note = pegRNA
ggtgtcacactgaagtccttgttttagagctagaaatagcaagttaaaataaggctagtccgttatcaacttgaaaaagtggcaccgagtcggtgcgtgtgagtgcaaaaaagaagctaaaggacttcagtgtgaca

SEQ ID NO: 3786 - RNA, 137 nt, synthetic construct
  source 1..137: mol_type = other RNA; note = pegRNA
ggtgtcacactgaagtccttgttttagagctagaaatagcaagttaaaataaggctagtccgttatcaacttgaaaaagtggcaccgagtcggtgcgtgtgagtgcaaaaaagaagctaaaggacttcagtgttttt

SEQ ID NO: 3787 - RNA, 137 nt, synthetic construct
  source 1..137: mol_type = other RNA; note = pegRNA
ggtgtcacactgaagtccttgttttagagctagaaatagcaagttaaaataaggctagtccgttatcaacttgaaaaagtggcaccgagtcggtgctgggcagtgtgagtgcaaaaaagaagcaaaaggacttcagt

SEQ ID NO: 3788 - RNA, 137 nt, synthetic construct
  source 1..137: mol_type = other RNA; note = pegRNA
ggtgtcacactgaagtccttgttttagagctagaaatagcaagttaaaataaggctagtccgttatcaacttgaaaaagtggcaccgagtcggtgctgggcagtgtgagtgcaaaaaagaagcgaaaggacttcagt

SEQ ID NO: 3789 - RNA, 137 nt, synthetic construct
  source 1..137: mol_type = other RNA; note = pegRNA
ggtgtcacactgaagtccttgttttagagctagaaatagcaagttaaaataaggctagtccgttatcaacttgaaaaagtggcaccgagtcggtgctgggcagtgtgagtgcaaaaaagaagctaaaggacttcagt

SEQ ID NO: 3790 - RNA, 138 nt, synthetic construct
  source 1..138: mol_type = other RNA; note = pegRNA
ggtgtcacactgaagtccttgttttagagctagaaatagcaagttaaaataaggctagtccgttatcaacttgaaaaagtggcaccgagtcggtgcagtgtgagtgcaaaaaagaagcaaaaggacttcagtgtgaca

SEQ ID NO: 3791 - RNA, 138 nt, synthetic construct
  source 1..138: mol_type = other RNA; note = pegRNA
ggtgtcacactgaagtccttgttttagagctagaaatagcaagttaaaataaggctagtccgttatcaacttgaaaaagtggcaccgagtcggtgcagtgtgagtgcaaaaaagaagcaaaaggacttcagtgttttt

SEQ ID NO: 3792 - RNA, 138 nt, synthetic construct
  source 1..138: mol_type = other RNA; note = pegRNA
ggtgtcacactgaagtccttgttttagagctagaaatagcaagttaaaataaggctagtccgttatcaacttgaaaaagtggcaccgagtcggtgcagtgtgagtgcaaaaaagaagcgaaaggacttcagtgtgaca

SEQ ID NO: 3793 - RNA, 138 nt, synthetic construct
  source 1..138: mol_type = other RNA; note = pegRNA
ggtgtcacactgaagtccttgttttagagctagaaatagcaagttaaaataaggctagtccgttatcaacttgaaaaagtggcaccgagtcggtgcagtgtgagtgcaaaaaagaagcgaaaggacttcagtgttttt

SEQ ID NO: 3794 - RNA, 138 nt, synthetic construct
  source 1..138: mol_type = other RNA; note = pegRNA
ggtgtcacactgaagtccttgttttagagctagaaatagcaagttaaaataaggctagtccgttatcaacttgaaaaagtggcaccgagtcggtgcagtgtgagtgcaaaaaagaagctaaaggacttcagtgtgaca

SEQ ID NO: 3795 - RNA, 138 nt, synthetic construct
  source 1..138: mol_type = other RNA; note = pegRNA
ggtgtcacactgaagtccttgttttagagctagaaatagcaagttaaaataaggctagtccgttatcaacttgaaaaagtggcaccgagtcggtgcagtgtgagtgcaaaaaagaagctaaaggacttcagtgttttt

SEQ ID NO: 3796 - RNA, 138 nt, synthetic construct
  source 1..138: mol_type = other RNA; note = pegRNA
ggtgtcacactgaagtccttgttttagagctagaaatagcaagttaaaataaggctagtccgttatcaacttgaaaaagtggcaccgagtcggtgccagtgtgagtgcaaaaaagaagcaaaaggacttcagtgtgac

SEQ ID NO: 3797 - RNA, 138 nt, synthetic construct
  source 1..138: mol_type = other RNA; note = pegRNA
ggtgtcacactgaagtccttgttttagagctagaaatagcaagttaaaataaggctagtccgttatcaacttgaaaaagtggcaccgagtcggtgccagtgtgagtgcaaaaaagaagcaaaaggacttcagtgtttt

SEQ ID NO: 3798 - RNA, 138 nt, synthetic construct
  source 1..138: mol_type = other RNA; note = pegRNA
ggtgtcacactgaagtccttgttttagagctagaaatagcaagttaaaataaggctagtccgttatcaacttgaaaaagtggcaccgagtcggtgccagtgtgagtgcaaaaaagaagcgaaaggacttcagtgtgac

SEQ ID NO: 3799 - RNA, 138 nt, synthetic construct
  source 1..138: mol_type = other RNA; note = pegRNA
ggtgtcacactgaagtccttgttttagagctagaaatagcaagttaaaataaggctagtccgttatcaacttgaaaaagtggcaccgagtcggtgccagtgtgagtgcaaaaaagaagcgaaaggacttcagtgtttt

SEQ ID NO: 3800 - RNA, 138 nt, synthetic construct
  source 1..138: mol_type = other RNA; note = pegRNA
ggtgtcacactgaagtccttgttttagagctagaaatagcaagttaaaataaggctagtccgttatcaacttgaaaaagtggcaccgagtcggtgccagtgtgagtgcaaaaaagaagctaaaggacttcagtgtgac

SEQ ID NO: 3801 - RNA, 138 nt, synthetic construct
  source 1..138: mol_type = other RNA; note = pegRNA
ggtgtcacactgaagtccttgttttagagctagaaatagcaagttaaaataaggctagtccgttatcaacttgaaaaagtggcaccgagtcggtgccagtgtgagtgcaaaaaagaagctaaaggacttcagtgtttt

SEQ ID NO: 3802 - RNA, 138 nt, synthetic construct
  source 1..138: mol_type = other RNA; note = pegRNA
ggtgtcacactgaagtccttgttttagagctagaaatagcaagttaaaataaggctagtccgttatcaacttgaaaaagtggcaccgagtcggtgcctgggcagtgtgagtgcaaaaaagaagcaaaaggacttcagt

SEQ ID NO: 3803 - RNA, 138 nt, synthetic construct
  source 1..138: mol_type = other RNA; note = pegRNA
ggtgtcacactgaagtccttgttttagagctagaaatagcaagttaaaataaggctagtccgttatcaacttgaaaaagtggcaccgagtcggtgcctgggcagtgtgagtgcaaaaaagaagcgaaaggacttcagt

SEQ ID NO: 3804 - RNA, 138 nt, synthetic construct
  source 1..138: mol_type = other RNA; note = pegRNA
ggtgtcacactgaagtccttgttttagagctagaaatagcaagttaaaataaggctagtccgttatcaacttgaaaaagtggcaccgagtcggtgcctgggcagtgtgagtgcaaaaaagaagctaaaggacttcagt

SEQ ID NO: 3805 - RNA, 138 nt, synthetic construct
  source 1..138: mol_type = other RNA; note = pegRNA
ggtgtcacactgaagtccttgttttagagctagaaatagcaagttaaaataaggctagtccgttatcaacttgaaaaagtggcaccgagtcggtgcgcagtgtgagtgcaaaaaagaagcaaaaggacttcagtgtga

SEQ ID NO: 3806 - RNA, 138 nt, synthetic construct
  source 1..138: mol_type = other RNA; note = pegRNA
ggtgtcacactgaagtccttgttttagagctagaaatagcaagttaaaataaggctagtccgttatcaacttgaaaaagtggcaccgagtcggtgcgcagtgtgagtgcaaaaaagaagcaaaaggacttcagttttt

SEQ ID NO: 3807 - RNA, 138 nt, synthetic construct
  source 1..138: mol_type = other RNA; note = pegRNA
ggtgtcacactgaagtccttgttttagagctagaaatagcaagttaaaataaggctagtccgttatcaacttgaaaaagtggcaccgagtcggtgcgcagtgtgagtgcaaaaaagaagcgaaaggacttcagtgtga

SEQ ID NO: 3808 - RNA, 138 nt, synthetic construct
  source 1..138: mol_type = other RNA; note = pegRNA
ggtgtcacactgaagtccttgttttagagctagaaatagcaagttaaaataaggctagtccgttatcaacttgaaaaagtggcaccgagtcggtgcgcagtgtgagtgcaaaaaagaagcgaaaggacttcagttttt

SEQ ID NO: 3809 - RNA, 138 nt, synthetic construct
  source 1..138: mol_type = other RNA; note = pegRNA
ggtgtcacactgaagtccttgttttagagctagaaatagcaagttaaaataaggctagtccgttatcaacttgaaaaagtggcaccgagtcggtgcgcagtgtgagtgcaaaaaagaagctaaaggacttcagtgtga

SEQ ID NO: 3810 - RNA, 138 nt, synthetic construct
  source 1..138: mol_type = other RNA; note = pegRNA
ggtgtcacactgaagtccttgttttagagctagaaatagcaagttaaaataaggctagtccgttatcaacttgaaaaagtggcaccgagtcggtgcgcagtgtgagtgcaaaaaagaagctaaaggacttcagttttt

SEQ ID NO: 3811 - RNA, 138 nt, synthetic construct
  source 1..138: mol_type = other RNA; note = pegRNA
ggtgtcacactgaagtccttgttttagagctagaaatagcaagttaaaataaggctagtccgttatcaacttgaaaaagtggcaccgagtcggtgcggcagtgtgagtgcaaaaaagaagcaaaaggacttcagtgtg

SEQ ID NO: 3812 - RNA, 138 nt, synthetic construct
  source 1..138: mol_type = other RNA; note = pegRNA
ggtgtcacactgaagtccttgttttagagctagaaatagcaagttaaaataaggctagtccgttatcaacttgaaaaagtggcaccgagtcggtgcggcagtgtgagtgcaaaaaagaagcaaaaggacttcagtttt

SEQ ID NO: 3813 - RNA, 138 nt, synthetic construct
  source 1..138: mol_type = other RNA; note = pegRNA
ggtgtcacactgaagtccttgttttagagctagaaatagcaagttaaaataaggctagtccgttatcaacttgaaaaagtggcaccgagtcggtgcggcagtgtgagtgcaaaaaagaagccaaaggacttcagtgtg

SEQ ID NO: 3814 - RNA, 138 nt, synthetic construct
  source 1..138: mol_type = other RNA; note = pegRNA
ggtgtcacactgaagtccttgttttagagctagaaatagcaagttaaaataaggctagtccgttatcaacttgaaaaagtggcaccgagtcggtgcggcagtgtgagtgcaaaaaagaagccaaaggacttcagtttt

SEQ ID NO: 3815 - RNA, 138 nt, synthetic construct
  source 1..138: mol_type = other RNA; note = pegRNA
ggtgtcacactgaagtccttgttttagagctagaaatagcaagttaaaataaggctagtccgttatcaacttgaaaaagtggcaccgagtcggtgcggcagtgtgagtgcaaaaaagaagcgaaaggacttcagtgtg

SEQ ID NO: 3816 - RNA, 138 nt, synthetic construct
  source 1..138: mol_type = other RNA; note = pegRNA
ggtgtcacactgaagtccttgttttagagctagaaatagcaagttaaaataaggctagtccgttatcaacttgaaaaagtggcaccgagtcggtgcggcagtgtgagtgcaaaaaagaagcgaaaggacttcagtttt

SEQ ID NO: 3817 - RNA, 138 nt, synthetic construct
  source 1..138: mol_type = other RNA; note = pegRNA
ggtgtcacactgaagtccttgttttagagctagaaatagcaagttaaaataaggctagtccgttatcaacttgaaaaagtggcaccgagtcggtgcggcagtgtgagtgcaaaaaagaagctaaaggacttcagtgtg

SEQ ID NO: 3818 - RNA, 138 nt, synthetic construct
  source 1..138: mol_type = other RNA; note = pegRNA
ggtgtcacactgaagtccttgttttagagctagaaatagcaagttaaaataaggctagtccgttatcaacttgaaaaagtggcaccgagtcggtgcggcagtgtgagtgcaaaaaagaagctaaaggacttcagtttt

SEQ ID NO: 3819 - RNA, 138 nt, synthetic construct
  source 1..138: mol_type = other RNA; note = pegRNA
ggtgtcacactgaagtccttgttttagagctagaaatagcaagttaaaataaggctagtccgttatcaacttgaaaaagtggcaccgagtcggtgcgggcagtgtgagtgcaaaaaagaagcaaaaggacttcagtgt

SEQ ID NO: 3820 - RNA, 138 nt, synthetic construct
  source 1..138: mol_type = other RNA; note = pegRNA
ggtgtcacactgaagtccttgttttagagctagaaatagcaagttaaaataaggctagtccgttatcaacttgaaaaagtggcaccgagtcggtgcgggcagtgtgagtgcaaaaaagaagcgaaaggacttcagtgt

SEQ ID NO: 3821 - RNA, 138 nt, synthetic construct
  source 1..138: mol_type = other RNA; note = pegRNA
ggtgtcacactgaagtccttgttttagagctagaaatagcaagttaaaataaggctagtccgttatcaacttgaaaaagtggcaccgagtcggtgcgggcagtgtgagtgcaaaaaagaagctaaaggacttcagtgt

SEQ ID NO: 3822 - RNA, 138 nt, synthetic construct
  source 1..138: mol_type = other RNA; note = pegRNA
ggtgtcacactgaagtccttgttttagagctagaaatagcaagttaaaataaggctagtccgttatcaacttgaaaaagtggcaccgagtcggtgcgtgtgagtgcaaaaaagaagcaaaaggacttcagtgtgacac

SEQ ID NO: 3823 - RNA, 138 nt, synthetic construct
  source 1..138: mol_type = other RNA; note = pegRNA
ggtgtcacactgaagtccttgttttagagctagaaatagcaagttaaaataaggctagtccgttatcaacttgaaaaagtggcaccgagtcggtgcgtgtgagtgcaaaaaagaagcaaaaggacttcagtgtgtttt

SEQ ID NO: 3824 - RNA, 138 nt, synthetic construct
  source 1..138: mol_type = other RNA; note = pegRNA
ggtgtcacactgaagtccttgttttagagctagaaatagcaagttaaaataaggctagtccgttatcaacttgaaaaagtggcaccgagtcggtgcgtgtgagtgcaaaaaagaagccaaaggacttcagtgtgtttt

SEQ ID NO: 3825 - RNA, 138 nt, synthetic construct
  source 1..138: mol_type = other RNA; note = pegRNA
ggtgtcacactgaagtccttgttttagagctagaaatagcaagttaaaataaggctagtccgttatcaacttgaaaaagtggcaccgagtcggtgcgtgtgagtgcaaaaaagaagcgaaaggacttcagtgtgacac

SEQ ID NO: 3826 - RNA, 138 nt, synthetic construct
  source 1..138: mol_type = other RNA; note = pegRNA
ggtgtcacactgaagtccttgttttagagctagaaatagcaagttaaaataaggctagtccgttatcaacttgaaaaagtggcaccgagtcggtgcgtgtgagtgcaaaaaagaagcgaaaggacttcagtgtgtttt

SEQ ID NO: 3827 - RNA, 138 nt, synthetic construct
  source 1..138: mol_type = other RNA; note = pegRNA
ggtgtcacactgaagtccttgttttagagctagaaatagcaagttaaaataaggctagtccgttatcaacttgaaaaagtggcaccgagtcggtgcgtgtgagtgcaaaaaagaagctaaaggacttcagtgtgacac

SEQ ID NO: 3828 - RNA, 138 nt, synthetic construct
  source 1..138: mol_type = other RNA; note = pegRNA
ggtgtcacactgaagtccttgttttagagctagaaatagcaagttaaaataaggctagtccgttatcaacttgaaaaagtggcaccgagtcggtgcgtgtgagtgcaaaaaagaagctaaaggacttcagtgtgtttt

SEQ ID NO: 3829 - RNA, 138 nt, synthetic construct
  source 1..138: mol_type = other RNA; note = pegRNA
ggtgtcacactgaagtccttgttttagagctagaaatagcaagttaaaataaggctagtccgttatcaacttgaaaaagtggcaccgagtcggtgctctgggcagtgtgagtgcaaaaaagaagcaaaaggacttcag

SEQ ID NO: 3830 - RNA, 138 nt, synthetic construct
  source 1..138: mol_type = other RNA; note = pegRNA
ggtgtcacactgaagtccttgttttagagctagaaatagcaagttaaaataaggctagtccgttatcaacttgaaaaagtggcaccgagtcggtgctctgggcagtgtgagtgcaaaaaagaagcgaaaggacttcag

SEQ ID NO: 3831 - RNA, 138 nt, synthetic construct
  source 1..138: mol_type = other RNA; note = pegRNA
ggtgtcacactgaagtccttgttttagagctagaaatagcaagttaaaataaggctagtccgttatcaacttgaaaaagtggcaccgagtcggtgctctgggcagtgtgagtgcaaaaaagaagctaaaggacttcag

SEQ ID NO: 3832 - RNA, 138 nt, synthetic construct
  source 1..138: mol_type = other RNA; note = pegRNA
ggtgtcacactgaagtccttgttttagagctagaaatagcaagttaaaataaggctagtccgttatcaacttgaaaaagtggcaccgagtcggtgctgggcagtgtgagtgcaaaaaagaagcaaaaggacttcagtg

SEQ ID NO: 3833 - RNA, 138 nt, synthetic construct
  source 1..138: mol_type = other RNA; note = pegRNA
ggtgtcacactgaagtccttgttttagagctagaaatagcaagttaaaataaggctagtccgttatcaacttgaaaaagtggcaccgagtcggtgctgggcagtgtgagtgcaaaaaagaagccaaaggacttcagtg

SEQ ID NO: 3834 - RNA, 138 nt, synthetic construct
  source 1..138: mol_type = other RNA; note = pegRNA
ggtgtcacactgaagtccttgttttagagctagaaatagcaagttaaaataaggctagtccgttatcaacttgaaaaagtggcaccgagtcggtgctgggcagtgtgagtgcaaaaaagaagcgaaaggacttcagtg

SEQ ID NO: 3835 - RNA, 138 nt, synthetic construct
  source 1..138: mol_type = other RNA; note = pegRNA
ggtgtcacactgaagtccttgttttagagctagaaatagcaagttaaaataaggctagtccgttatcaacttgaaaaagtggcaccgagtcggtgctgggcagtgtgagtgcaaaaaagaagctaaaggacttcagtg

SEQ ID NO: 3836 - RNA, 139 nt, synthetic construct
  source 1..139: mol_type = other RNA; note = pegRNA
ggtgtcacactgaagtccttgttttagagctagaaatagcaagttaaaataaggctagtccgttatcaacttgaaaaagtggcaccgagtcggtgcagtgtgagtgcaaaaaagaagcaaaaggacttcagtgtgacac

SEQ ID NO: 3837 - RNA, 139 nt, synthetic construct
  source 1..139: mol_type = other RNA; note = pegRNA
ggtgtcacactgaagtccttgttttagagctagaaatagcaagttaaaataaggctagtccgttatcaacttgaaaaagtggcaccgagtcggtgcagtgtgagtgcaaaaaagaagcaaaaggacttcagtgtgtttt

SEQ ID NO: 3838 - RNA, 139 nt, synthetic construct
  source 1..139: mol_type = other RNA; note = pegRNA
ggtgtcacactgaagtccttgttttagagctagaaatagcaagttaaaataaggctagtccgttatcaacttgaaaaagtggcaccgagtcggtgcagtgtgagtgcaaaaaagaagcgaaaggacttcagtgtgacac

SEQ ID NO: 3839 - RNA, 139 nt, synthetic construct
  source 1..139: mol_type = other RNA; note = pegRNA
ggtgtcacactgaagtccttgttttagagctagaaatagcaagttaaaataaggctagtccgttatcaacttgaaaaagtggcaccgagtcggtgcagtgtgagtgcaaaaaagaagcgaaaggacttcagtgtgtttt

SEQ ID NO: 3840 - RNA, 139 nt, synthetic construct
  source 1..139: mol_type = other RNA; note = pegRNA
ggtgtcacactgaagtccttgttttagagctagaaatagcaagttaaaataaggctagtccgttatcaacttgaaaaagtggcaccgagtcggtgcagtgtgagtgcaaaaaagaagctaaaggacttcagtgtgacac

SEQ ID NO: 3841 - RNA, 139 nt, synthetic construct
  source 1..139: mol_type = other RNA; note = pegRNA
ggtgtcacactgaagtccttgttttagagctagaaatagcaagttaaaataaggctagtccgttatcaacttgaaaaagtggcaccgagtcggtgcagtgtgagtgcaaaaaagaagctaaaggacttcagtgtgtttt

SEQ ID NO: 3842 - RNA, 139 nt, synthetic construct
  source 1..139: mol_type = other RNA; note = pegRNA
ggtgtcacactgaagtccttgttttagagctagaaatagcaagttaaaataaggctagtccgttatcaacttgaaaaagtggcaccgagtcggtgccagtgtgagtgcaaaaaagaagcaaaaggacttcagtgtgaca

SEQ ID NO: 3843 - RNA, 139 nt, synthetic construct
  source 1..139: mol_type = other RNA; note = pegRNA
ggtgtcacactgaagtccttgttttagagctagaaatagcaagttaaaataaggctagtccgttatcaacttgaaaaagtggcaccgagtcggtgccagtgtgagtgcaaaaaagaagcaaaaggacttcagtgttttt

SEQ ID NO: 3844 - RNA, 139 nt, synthetic construct
  source 1..139: mol_type = other RNA; note = pegRNA
ggtgtcacactgaagtccttgttttagagctagaaatagcaagttaaaataaggctagtccgttatcaacttgaaaaagtggcaccgagtcggtgccagtgtgagtgcaaaaaagaagcgaaaggacttcagtgtgaca

SEQ ID NO: 3845 - RNA, 139 nt, synthetic construct
  source 1..139: mol_type = other RNA; note = pegRNA
ggtgtcacactgaagtccttgttttagagctagaaatagcaagttaaaataaggctagtccgttatcaacttgaaaaagtggcaccgagtcggtgccagtgtgagtgcaaaaaagaagcgaaaggacttcagtgttttt

SEQ ID NO: 3846 - RNA, 139 nt, synthetic construct
  source 1..139: mol_type = other RNA; note = pegRNA
ggtgtcacactgaagtccttgttttagagctagaaatagcaagttaaaataaggctagtccgttatcaacttgaaaaagtggcaccgagtcggtgccagtgtgagtgcaaaaaagaagctaaaggacttcagtgtgaca

SEQ ID NO: 3847 - RNA, 139 nt, synthetic construct
  source 1..139: mol_type = other RNA; note = pegRNA
ggtgtcacactgaagtccttgttttagagctagaaatagcaagttaaaataaggctagtccgttatcaacttgaaaaagtggcaccgagtcggtgccagtgtgagtgcaaaaaagaagctaaaggacttcagtgttttt

SEQ ID NO: 3848 - RNA, 139 nt, synthetic construct
  source 1..139: mol_type = other RNA; note = pegRNA
ggtgtcacactgaagtccttgttttagagctagaaatagcaagttaaaataaggctagtccgttatcaacttgaaaaagtggcaccgagtcggtgcctctgggcagtgtgagtgcaaaaaagaagcaaaaggacttcag

SEQ ID NO: 3849 - RNA, 139 nt, synthetic construct
  source 1..139: mol_type = other RNA; note = pegRNA
ggtgtcacactgaagtccttgttttagagctagaaatagcaagttaaaataaggctagtccgttatcaacttgaaaaagtggcaccgagtcggtgcctctgggcagtgtgagtgcaaaaaagaagcgaaaggacttcag

SEQ ID NO: 3850 - RNA, 139 nt, synthetic construct
  source 1..139: mol_type = other RNA; note = pegRNA
ggtgtcacactgaagtccttgttttagagctagaaatagcaagttaaaataaggctagtccgttatcaacttgaaaaagtggcaccgagtcggtgcctctgggcagtgtgagtgcaaaaaagaagctaaaggacttcag

SEQ ID NO: 3851 - RNA, 139 nt, synthetic construct
  source 1..139: mol_type = other RNA; note = pegRNA
ggtgtcacactgaagtccttgttttagagctagaaatagcaagttaaaataaggctagtccgttatcaacttgaaaaagtggcaccgagtcggtgcctgggcagtgtgagtgcaaaaaagaagcaaaaggacttcagtg

SEQ ID NO: 3852 - RNA, 139 nt, synthetic construct
  source 1..139: mol_type = other RNA; note = pegRNA
ggtgtcacactgaagtccttgttttagagctagaaatagcaagttaaaataaggctagtccgttatcaacttgaaaaagtggcaccgagtcggtgcctgggcagtgtgagtgcaaaaaagaagcgaaaggacttcagtg

SEQ ID NO: 3853 - RNA, 139 nt, synthetic construct
  source 1..139: mol_type = other RNA; note = pegRNA
ggtgtcacactgaagtccttgttttagagctagaaatagcaagttaaaataaggctagtccgttatcaacttgaaaaagtggcaccgagtcggtgcctgggcagtgtgagtgcaaaaaagaagctaaaggacttcagtg

SEQ ID NO: 3854 - RNA, 139 nt, synthetic construct
  source 1..139: mol_type = other RNA; note = pegRNA
ggtgtcacactgaagtccttgttttagagctagaaatagcaagttaaaataaggctagtccgttatcaacttgaaaaagtggcaccgagtcggtgcgcagtgtgagtgcaaaaaagaagcaaaaggacttcagtgtgac

SEQ ID NO: 3855 - RNA, 139 nt, synthetic construct
  source 1..139: mol_type = other RNA; note = pegRNA
ggtgtcacactgaagtccttgttttagagctagaaatagcaagttaaaataaggctagtccgttatcaacttgaaaaagtggcaccgagtcggtgcgcagtgtgagtgcaaaaaagaagcaaaaggacttcagtgtttt

SEQ ID NO: 3856 - RNA, 139 nt, synthetic construct
  source 1..139: mol_type = other RNA; note = pegRNA
ggtgtcacactgaagtccttgttttagagctagaaatagcaagttaaaataaggctagtccgttatcaacttgaaaaagtggcaccgagtcggtgcgcagtgtgagtgcaaaaaagaagccaaaggacttcagtgtgac

SEQ ID NO: 3857 - RNA, 139 nt, synthetic construct
  source 1..139: mol_type = other RNA; note = pegRNA
ggtgtcacactgaagtccttgttttagagctagaaatagcaagttaaaataaggctagtccgttatcaacttgaaaaagtggcaccgagtcggtgcgcagtgtgagtgcaaaaaagaagccaaaggacttcagtgtttt

SEQ ID NO: 3858 - RNA, 139 nt, synthetic construct
  source 1..139: mol_type = other RNA; note = pegRNA
ggtgtcacactgaagtccttgttttagagctagaaatagcaagttaaaataaggctagtccgttatcaacttgaaaaagtggcaccgagtcggtgcgcagtgtgagtgcaaaaaagaagcgaaaggacttcagtgtgac

SEQ ID NO: 3859 - RNA, 139 nt, synthetic construct
  source 1..139: mol_type = other RNA; note = pegRNA
ggtgtcacactgaagtccttgttttagagctagaaatagcaagttaaaataaggctagtccgttatcaacttgaaaaagtggcaccgagtcggtgcgcagtgtgagtgcaaaaaagaagcgaaaggacttcagtgtttt

SEQ ID NO: 3860 - RNA, 139 nt, synthetic construct
  source 1..139: mol_type = other RNA; note = pegRNA
ggtgtcacactgaagtccttgttttagagctagaaatagcaagttaaaataaggctagtccgttatcaacttgaaaaagtggcaccgagtcggtgcgcagtgtgagtgcaaaaaagaagctaaaggacttcagtgtgac

SEQ ID NO: 3861 - RNA, 139 nt, synthetic construct
  source 1..139: mol_type = other RNA; note = pegRNA
ggtgtcacactgaagtccttgttttagagctagaaatagcaagttaaaataaggctagtccgttatcaacttgaaaaagtggcaccgagtcggtgcgcagtgtgagtgcaaaaaagaagctaaaggacttcagtgtttt

SEQ ID NO: 3862 - RNA, 139 nt, synthetic construct
  source 1..139: mol_type = other RNA; note = pegRNA
ggtgtcacactgaagtccttgttttagagctagaaatagcaagttaaaataaggctagtccgttatcaacttgaaaaagtggcaccgagtcggtgcggcagtgtgagtgcaaaaaagaagcaaaaggacttcagtgtga

SEQ ID NO: 3863 - RNA, 139 nt, synthetic construct
  source 1..139: mol_type = other RNA; note = pegRNA
ggtgtcacactgaagtccttgttttagagctagaaatagcaagttaaaataaggctagtccgttatcaacttgaaaaagtggcaccgagtcggtgcggcagtgtgagtgcaaaaaagaagcaaaaggacttcagttttt

SEQ ID NO: 3864 - RNA, 139 nt, synthetic construct
  source 1..139: mol_type = other RNA; note = pegRNA
ggtgtcacactgaagtccttgttttagagctagaaatagcaagttaaaataaggctagtccgttatcaacttgaaaaagtggcaccgagtcggtgcggcagtgtgagtgcaaaaaagaagcgaaaggacttcagtgtga

SEQ ID NO: 3865 - RNA, 139 nt, synthetic construct
  source 1..139: mol_type = other RNA; note = pegRNA
ggtgtcacactgaagtccttgttttagagctagaaatagcaagttaaaataaggctagtccgttatcaacttgaaaaagtggcaccgagtcggtgcggcagtgtgagtgcaaaaaagaagcgaaaggacttcagttttt

SEQ ID NO: 3866 - RNA, 139 nt, synthetic construct
  source 1..139: mol_type = other RNA; note = pegRNA
ggtgtcacactgaagtccttgttttagagctagaaatagcaagttaaaataaggctagtccgttatcaacttgaaaaagtggcaccgagtcggtgcggcagtgtgagtgcaaaaaagaagctaaaggacttcagtgtga

SEQ ID NO: 3867 - RNA, 139 nt, synthetic construct
  source 1..139: mol_type = other RNA; note = pegRNA
ggtgtcacactgaagtccttgttttagagctagaaatagcaagttaaaataaggctagtccgttatcaacttgaaaaagtggcaccgagtcggtgcggcagtgtgagtgcaaaaaagaagctaaaggacttcagttttt

SEQ ID NO: 3868 - RNA, 139 nt, synthetic construct
  source 1..139: mol_type = other RNA; note = pegRNA
ggtgtcacactgaagtccttgttttagagctagaaatagcaagttaaaataaggctagtccgttatcaacttgaaaaagtggcaccgagtcggtgcgggcagtgtgagtgcaaaaaagaagcaaaaggacttcagtgtg

SEQ ID NO: 3869 - RNA, 139 nt, synthetic construct
  source 1..139: mol_type = other RNA; note = pegRNA
ggtgtcacactgaagtccttgttttagagctagaaatagcaagttaaaataaggctagtccgttatcaacttgaaaaagtggcaccgagtcggtgcgggcagtgtgagtgcaaaaaagaagcaaaaggacttcagtttt

SEQ ID NO: 3870 - RNA, 139 nt, synthetic construct
  source 1..139: mol_type = other RNA; note = pegRNA
ggtgtcacactgaagtccttgttttagagctagaaatagcaagttaaaataaggctagtccgttatcaacttgaaaaagtggcaccgagtcggtgcgggcagtgtgagtgcaaaaaagaagcgaaaggacttcagtgtg

SEQ ID NO: 3871 - RNA, 139 nt, synthetic construct
  source 1..139: mol_type = other RNA; note = pegRNA
ggtgtcacactgaagtccttgttttagagctagaaatagcaagttaaaataaggctagtccgttatcaacttgaaaaagtggcaccgagtcggtgcgggcagtgtgagtgcaaaaaagaagcgaaaggacttcagtttt

SEQ ID NO: 3872 - RNA, 139 nt, synthetic construct
  source 1..139: mol_type = other RNA; note = pegRNA
ggtgtcacactgaagtccttgttttagagctagaaatagcaagttaaaataaggctagtccgttatcaacttgaaaaagtggcaccgagtcggtgcgggcagtgtgagtgcaaaaaagaagctaaaggacttcagtgtg

SEQ ID NO: 3873 - RNA, 139 nt, synthetic construct
  source 1..139: mol_type = other RNA; note = pegRNA
ggtgtcacactgaagtccttgttttagagctagaaatagcaagttaaaataaggctagtccgttatcaacttgaaaaagtggcaccgagtcggtgcgggcagtgtgagtgcaaaaaagaagctaaaggacttcagtttt

SEQ ID NO: 3874 - RNA, 139 nt, synthetic construct
  source 1..139: mol_type = other RNA; note = pegRNA
ggtgtcacactgaagtccttgttttagagctagaaatagcaagttaaaataaggctagtccgttatcaacttgaaaaagtggcaccgagtcggtgcgtgtgagtgcaaaaaagaagcaaaaggacttcagtgtgatttt

SEQ ID NO: 3875 - RNA, 139 nt, synthetic construct
  source 1..139: mol_type = other RNA; note = pegRNA
ggtgtcacactgaagtccttgttttagagctagaaatagcaagttaaaataaggctagtccgttatcaacttgaaaaagtggcaccgagtcggtgcgtgtgagtgcaaaaaagaagcgaaaggacttcagtgtgatttt

SEQ ID NO: 3876 - RNA, 139 nt, synthetic construct
  source 1..139: mol_type = other RNA; note = pegRNA
ggtgtcacactgaagtccttgttttagagctagaaatagcaagttaaaataaggctagtccgttatcaacttgaaaaagtggcaccgagtcggtgcgtgtgagtgcaaaaaagaagctaaaggacttcagtgtgatttt

SEQ ID NO: 3877 - RNA, 139 nt, synthetic construct
  source 1..139: mol_type = other RNA; note = pegRNA
ggtgtcacactgaagtccttgttttagagctagaaatagcaagttaaaataaggctagtccgttatcaacttgaaaaagtggcaccgagtcggtgctctgggcagtgtgagtgcaaaaaagaagcaaaaggacttcagt

SEQ ID NO: 3878 - RNA, 139 nt, synthetic construct
  source 1..139: mol_type = other RNA; note = pegRNA
ggtgtcacactgaagtccttgttttagagctagaaatagcaagttaaaataaggctagtccgttatcaacttgaaaaagtggcaccgagtcggtgctctgggcagtgtgagtgcaaaaaagaagcgaaaggacttcagt

SEQ ID NO: 3879 - RNA, 139 nt, synthetic construct
  source 1..139: mol_type = other RNA; note = pegRNA
ggtgtcacactgaagtccttgttttagagctagaaatagcaagttaaaataaggctagtccgttatcaacttgaaaaagtggcaccgagtcggtgctctgggcagtgtgagtgcaaaaaagaagctaaaggacttcagt

SEQ ID NO: 3880 - RNA, 139 nt, synthetic construct
  source 1..139: mol_type = other RNA; note = pegRNA
ggtgtcacactgaagtccttgttttagagctagaaatagcaagttaaaataaggctagtccgttatcaacttgaaaaagtggcaccgagtcggtgctgggcagtgtgagtgcaaaaaagaagcaaaaggacttcagtgt

SEQ ID NO: 3881 - RNA, 139 nt, synthetic construct
  source 1..139: mol_type = other RNA; note = pegRNA
ggtgtcacactgaagtccttgttttagagctagaaatagcaagttaaaataaggctagtccgttatcaacttgaaaaagtggcaccgagtcggtgctgggcagtgtgagtgcaaaaaagaagcgaaaggacttcagtgt

SEQ ID NO: 3882 - RNA, 139 nt, synthetic construct
  source 1..139: mol_type = other RNA; note = pegRNA
ggtgtcacactgaagtccttgttttagagctagaaatagcaagttaaaataaggctagtccgttatcaacttgaaaaagtggcaccgagtcggtgctgggcagtgtgagtgcaaaaaagaagctaaaggacttcagtgt

SEQ ID NO: 3883 - RNA, 140 nt, synthetic construct
  source 1..140: mol_type = other RNA; note = pegRNA
ggtgtcacactgaagtccttgttttagagctagaaatagcaagttaaaataaggctagtccgttatcaacttgaaaaagtggcaccgagtcggtgcactctgggcagtgtgagtgcaaaaaagaagcaaaaggacttcag

SEQ ID NO: 3884 - RNA, 140 nt, synthetic construct
  source 1..140: mol_type = other RNA; note = pegRNA
ggtgtcacactgaagtccttgttttagagctagaaatagcaagttaaaataaggctagtccgttatcaacttgaaaaagtggcaccgagtcggtgcactctgggcagtgtgagtgcaaaaaagaagcgaaaggacttcag

SEQ ID NO: 3885 - RNA, 140 nt, synthetic construct
  source 1..140: mol_type = other RNA; note = pegRNA
ggtgtcacactgaagtccttgttttagagctagaaatagcaagttaaaataaggctagtccgttatcaacttgaaaaagtggcaccgagtcggtgcactctgggcagtgtgagtgcaaaaaagaagctaaaggacttcag

SEQ ID NO: 3886 - RNA, 140 nt, synthetic construct
  source 1..140: mol_type = other RNA; note = pegRNA
ggtgtcacactgaagtccttgttttagagctagaaatagcaagttaaaataaggctagtccgttatcaacttgaaaaagtggcaccgagtcggtgcagtgtgagtgcaaaaaagaagcaaaaggacttcagtgtgatttt

SEQ ID NO: 3887 - RNA, 140 nt, synthetic construct
  source 1..140: mol_type = other RNA; note = pegRNA
ggtgtcacactgaagtccttgttttagagctagaaatagcaagttaaaataaggctagtccgttatcaacttgaaaaagtggcaccgagtcggtgcagtgtgagtgcaaaaaagaagcgaaaggacttcagtgtgatttt

SEQ ID NO: 3888 - RNA, 140 nt, synthetic construct
  source 1..140: mol_type = other RNA; note = pegRNA
ggtgtcacactgaagtccttgttttagagctagaaatagcaagttaaaataaggctagtccgttatcaacttgaaaaagtggcaccgagtcggtgcagtgtgagtgcaaaaaagaagctaaaggacttcagtgtgatttt

SEQ ID NO: 3889 - RNA, 140 nt, synthetic construct
  source 1..140: mol_type = other RNA; note = pegRNA
ggtgtcacactgaagtccttgttttagagctagaaatagcaagttaaaataaggctagtccgttatcaacttgaaaaagtggcaccgagtcggtgccagtgtgagtgcaaaaaagaagcaaaaggacttcagtgtgacac

SEQ ID NO: 3890 - RNA, 140 nt, synthetic construct
  source 1..140: mol_type = other RNA; note = pegRNA
ggtgtcacactgaagtccttgttttagagctagaaatagcaagttaaaataaggctagtccgttatcaacttgaaaaagtggcaccgagtcggtgccagtgtgagtgcaaaaaagaagcaaaaggacttcagtgtgtttt

SEQ ID NO: 3891 - RNA, 140 nt, synthetic construct
  source 1..140: mol_type = other RNA; note = pegRNA
ggtgtcacactgaagtccttgttttagagctagaaatagcaagttaaaataaggctagtccgttatcaacttgaaaaagtggcaccgagtcggtgccagtgtgagtgcaaaaaagaagcgaaaggacttcagtgtgacac

SEQ ID NO: 3892 - RNA, 140 nt, synthetic construct
  source 1..140: mol_type = other RNA; note = pegRNA
ggtgtcacactgaagtccttgttttagagctagaaatagcaagttaaaataaggctagtccgttatcaacttgaaaaagtggcaccgagtcggtgccagtgtgagtgcaaaaaagaagcgaaaggacttcagtgtgtttt

SEQ ID NO: 3893 - RNA, 140 nt, synthetic construct
  source 1..140: mol_type = other RNA; note = pegRNA
ggtgtcacactgaagtccttgttttagagctagaaatagcaagttaaaataaggctagtccgttatcaacttgaaaaagtggcaccgagtcggtgccagtgtgagtgcaaaaaagaagctaaaggacttcagtgtgacac

SEQ ID NO: 3894 - RNA, 140 nt, synthetic construct
  source 1..140: mol_type = other RNA; note = pegRNA
ggtgtcacactgaagtccttgttttagagctagaaatagcaagttaaaataaggctagtccgttatcaacttgaaaaagtggcaccgagtcggtgccagtgtgagtgcaaaaaagaagctaaaggacttcagtgtgtttt

SEQ ID NO: 3895 - RNA, 140 nt, synthetic construct
  source 1..140: mol_type = other RNA; note = pegRNA
ggtgtcacactgaagtccttgttttagagctagaaatagcaagttaaaataaggctagtccgttatcaacttgaaaaagtggcaccgagtcggtgcctctgggcagtgtgagtgcaaaaaagaagcaaaaggacttcagt

SEQ ID NO: 3896 - RNA, 140 nt, synthetic construct
  source 1..140: mol_type = other RNA; note = pegRNA
ggtgtcacactgaagtccttgttttagagctagaaatagcaagttaaaataaggctagtccgttatcaacttgaaaaagtggcaccgagtcggtgcctctgggcagtgtgagtgcaaaaaagaagcgaaaggacttcagt

SEQ ID NO: 3897 - RNA, 140 nt, synthetic construct
  source 1..140: mol_type = other RNA; note = pegRNA
ggtgtcacactgaagtccttgttttagagctagaaatagcaagttaaaataaggctagtccgttatcaacttgaaaaagtggcaccgagtcggtgcctctgggcagtgtgagtgcaaaaaagaagctaaaggacttcagt

SEQ ID NO: 3898 - RNA, 140 nt, synthetic construct
  source 1..140: mol_type = other RNA; note = pegRNA
ggtgtcacactgaagtccttgttttagagctagaaatagcaagttaaaataaggctagtccgttatcaacttgaaaaagtggcaccgagtcggtgcctgggcagtgtgagtgcaaaaaagaagcaaaaggacttcagtgt

SEQ ID NO: 3899 - RNA, 140 nt, synthetic construct
  source 1..140: mol_type = other RNA; note = pegRNA
ggtgtcacactgaagtccttgttttagagctagaaatagcaagttaaaataaggctagtccgttatcaacttgaaaaagtggcaccgagtcggtgcctgggcagtgtgagtgcaaaaaagaagcgaaaggacttcagtgt

SEQ ID NO: 3900 - RNA, 140 nt, synthetic construct
  source 1..140: mol_type = other RNA; note = pegRNA
ggtgtcacactgaagtccttgttttagagctagaaatagcaagttaaaataaggctagtccgttatcaacttgaaaaagtggcaccgagtcggtgcctgggcagtgtgagtgcaaaaaagaagctaaaggacttcagtgt

SEQ ID NO: 3901 - RNA, 140 nt, synthetic construct
  source 1..140: mol_type = other RNA; note = pegRNA
ggtgtcacactgaagtccttgttttagagctagaaatagcaagttaaaataaggctagtccgttatcaacttgaaaaagtggcaccgagtcggtgcgcagtgtgagtgcaaaaaagaagcaaaaggacttcagtgtgaca

SEQ ID NO: 3902 - RNA, 140 nt, synthetic construct
  source 1..140: mol_type = other RNA; note = pegRNA
ggtgtcacactgaagtccttgttttagagctagaaatagcaagttaaaataaggctagtccgttatcaacttgaaaaagtggcaccgagtcggtgcgcagtgtgagtgcaaaaaagaagcaaaaggacttcagtgttttt

SEQ ID NO: 3903 - RNA, 140 nt, synthetic construct
  source 1..140: mol_type = other RNA; note = pegRNA
ggtgtcacactgaagtccttgttttagagctagaaatagcaagttaaaataaggctagtccgttatcaacttgaaaaagtggcaccgagtcggtgcgcagtgtgagtgcaaaaaagaagcgaaaggacttcagtgtgaca

SEQ ID NO: 3904 - RNA, 140 nt, synthetic construct
  source 1..140: mol_type = other RNA; note = pegRNA
ggtgtcacactgaagtccttgttttagagctagaaatagcaagttaaaataaggctagtccgttatcaacttgaaaaagtggcaccgagtcggtgcgcagtgtgagtgcaaaaaagaagcgaaaggacttcagtgttttt

SEQ ID NO: 3905 - RNA, 140 nt, synthetic construct
  source 1..140: mol_type = other RNA; note = pegRNA
ggtgtcacactgaagtccttgttttagagctagaaatagcaagttaaaataaggctagtccgttatcaacttgaaaaagtggcaccgagtcggtgcgcagtgtgagtgcaaaaaagaagctaaaggacttcagtgtgaca

SEQ ID NO: 3906 - RNA, 140 nt, synthetic construct
  source 1..140: mol_type = other RNA; note = pegRNA
ggtgtcacactgaagtccttgttttagagctagaaatagcaagttaaaataaggctagtccgttatcaacttgaaaaagtggcaccgagtcggtgcgcagtgtgagtgcaaaaaagaagctaaaggacttcagtgttttt

SEQ ID NO: 3907 - RNA, 140 nt, synthetic construct
  source 1..140: mol_type = other RNA; note = pegRNA
ggtgtcacactgaagtccttgttttagagctagaaatagcaagttaaaataaggctagtccgttatcaacttgaaaaagtggcaccgagtcggtgcggcagtgtgagtgcaaaaaagaagcaaaaggacttcagtgtgac

SEQ ID NO: 3908 - RNA, 140 nt, synthetic construct
  source 1..140: mol_type = other RNA; note = pegRNA
ggtgtcacactgaagtccttgttttagagctagaaatagcaagttaaaataaggctagtccgttatcaacttgaaaaagtggcaccgagtcggtgcggcagtgtgagtgcaaaaaagaagcaaaaggacttcagtgtttt

SEQ ID NO: 3909 - RNA, 140 nt, synthetic construct
  source 1..140: mol_type = other RNA; note = pegRNA
ggtgtcacactgaagtccttgttttagagctagaaatagcaagttaaaataaggctagtccgttatcaacttgaaaaagtggcaccgagtcggtgcggcagtgtgagtgcaaaaaagaagccaaaggacttcagtgtgac

SEQ ID NO: 3910 - RNA, 140 nt, synthetic construct
  source 1..140: mol_type = other RNA; note = pegRNA
ggtgtcacactgaagtccttgttttagagctagaaatagcaagttaaaataaggctagtccgttatcaacttgaaaaagtggcaccgagtcggtgcggcagtgtgagtgcaaaaaagaagccaaaggacttcagtgtttt

SEQ ID NO: 3911 - RNA, 140 nt, synthetic construct
  source 1..140: mol_type = other RNA; note = pegRNA
ggtgtcacactgaagtccttgttttagagctagaaatagcaagttaaaataaggctagtccgttatcaacttgaaaaagtggcaccgagtcggtgcggcagtgtgagtgcaaaaaagaagcgaaaggacttcagtgtgac

SEQ ID NO: 3912 - RNA, 140 nt, synthetic construct
  source 1..140: mol_type = other RNA; note = pegRNA
ggtgtcacactgaagtccttgttttagagctagaaatagcaagttaaaataaggctagtccgttatcaacttgaaaaagtggcaccgagtcggtgcggcagtgtgagtgcaaaaaagaagcgaaaggacttcagtgtttt

SEQ ID NO: 3913 - RNA, 140 nt, synthetic construct
  source 1..140: mol_type = other RNA; note = pegRNA
ggtgtcacactgaagtccttgttttagagctagaaatagcaagttaaaataaggctagtccgttatcaacttgaaaaagtggcaccgagtcggtgcggcagtgtgagtgcaaaaaagaagctaaaggacttcagtgtgac

SEQ ID NO: 3914 - RNA, 140 nt, synthetic construct
  source 1..140: mol_type = other RNA; note = pegRNA
ggtgtcacactgaagtccttgttttagagctagaaatagcaagttaaaataaggctagtccgttatcaacttgaaaaagtggcaccgagtcggtgcggcagtgtgagtgcaaaaaagaagctaaaggacttcagtgtttt

SEQ ID NO: 3915 - RNA, 140 nt, synthetic construct
  source 1..140: mol_type = other RNA; note = pegRNA
ggtgtcacactgaagtccttgttttagagctagaaatagcaagttaaaataaggctagtccgttatcaacttgaaaaagtggcaccgagtcggtgcgggcagtgtgagtgcaaaaaagaagcaaaaggacttcagtgtga

SEQ ID NO: 3916 - RNA, 140 nt, synthetic construct
  source 1..140: mol_type = other RNA; note = pegRNA
ggtgtcacactgaagtccttgttttagagctagaaatagcaagttaaaataaggctagtccgttatcaacttgaaaaagtggcaccgagtcggtgcgggcagtgtgagtgcaaaaaagaagcaaaaggacttcagttttt

SEQ ID NO: 3917 - RNA, 140 nt, synthetic construct
  source 1..140: mol_type = other RNA; note = pegRNA
ggtgtcacactgaagtccttgttttagagctagaaatagcaagttaaaataaggctagtccgttatcaacttgaaaaagtggcaccgagtcggtgcgggcagtgtgagtgcaaaaaagaagcgaaaggacttcagtgtga

SEQ ID NO: 3918 - RNA, 140 nt, synthetic construct
  source 1..140: mol_type = other RNA; note = pegRNA
ggtgtcacactgaagtccttgttttagagctagaaatagcaagttaaaataaggctagtccgttatcaacttgaaaaagtggcaccgagtcggtgcgggcagtgtgagtgcaaaaaagaagcgaaaggacttcagttttt

SEQ ID NO: 3919 - RNA, 140 nt, synthetic construct
  source 1..140: mol_type = other RNA; note = pegRNA
ggtgtcacactgaagtccttgttttagagctagaaatagcaagttaaaataaggctagtccgttatcaacttgaaaaagtggcaccgagtcggtgcgggcagtgtgagtgcaaaaaagaagctaaaggacttcagtgtga

SEQ ID NO: 3920 - RNA, 140 nt, synthetic construct
  source 1..140: mol_type = other RNA; note = pegRNA
ggtgtcacactgaagtccttgttttagagctagaaatagcaagttaaaataaggctagtccgttatcaacttgaaaaagtggcaccgagtcggtgcgggcagtgtgagtgcaaaaaagaagctaaaggacttcagttttt

SEQ ID NO: 3921 - RNA, 140 nt, synthetic construct
  source 1..140: mol_type = other RNA; note = pegRNA
ggtgtcacactgaagtccttgttttagagctagaaatagcaagttaaaataaggctagtccgttatcaacttgaaaaagtggcaccgagtcggtgcgtgtgagtgcaaaaaagaagcaaaaggacttcagtgtgactttt

SEQ ID NO: 3922 - RNA, 140 nt, synthetic construct
  source 1..140: mol_type = other RNA; note = pegRNA
ggtgtcacactgaagtccttgttttagagctagaaatagcaagttaaaataaggctagtccgttatcaacttgaaaaagtggcaccgagtcggtgcgtgtgagtgcaaaaaagaagccaaaggacttcagtgtgactttt

SEQ ID NO: 3923 - RNA, 140 nt, synthetic construct
  source 1..140: mol_type = other RNA; note = pegRNA
ggtgtcacactgaagtccttgttttagagctagaaatagcaagttaaaataaggctagtccgttatcaacttgaaaaagtggcaccgagtcggtgcgtgtgagtgcaaaaaagaagcgaaaggacttcagtgtgactttt

SEQ ID NO: 3924 - RNA, 140 nt, synthetic construct
  source 1..140: mol_type = other RNA; note = pegRNA
ggtgtcacactgaagtccttgttttagagctagaaatagcaagttaaaataaggctagtccgttatcaacttgaaaaagtggcaccgagtcggtgcgtgtgagtgcaaaaaagaagctaaaggacttcagtgtgactttt

SEQ ID NO: 3925 - RNA, 140 nt, synthetic construct
  source 1..140: mol_type = other RNA; note = pegRNA
ggtgtcacactgaagtccttgttttagagctagaaatagcaagttaaaataaggctagtccgttatcaacttgaaaaagtggcaccgagtcggtgctctgggcagtgtgagtgcaaaaaagaagcaaaaggacttcagtg

SEQ ID NO: 3926 - RNA, 140 nt, synthetic construct
  source 1..140: mol_type = other RNA; note = pegRNA
ggtgtcacactgaagtccttgttttagagctagaaatagcaagttaaaataaggctagtccgttatcaacttgaaaaagtggcaccgagtcggtgctctgggcagtgtgagtgcaaaaaagaagcgaaaggacttcagtg

SEQ ID NO: 3927 - RNA, 140 nt, synthetic construct
  source 1..140: mol_type = other RNA; note = pegRNA
ggtgtcacactgaagtccttgttttagagctagaaatagcaagttaaaataaggctagtccgttatcaacttgaaaaagtggcaccgagtcggtgctctgggcagtgtgagtgcaaaaaagaagctaaaggacttcagtg

SEQ ID NO: 3928 - RNA, 140 nt, synthetic construct
  source 1..140: mol_type = other RNA; note = pegRNA
ggtgtcacactgaagtccttgttttagagctagaaatagcaagttaaaataaggctagtccgttatcaacttgaaaaagtggcaccgagtcggtgctgggcagtgtgagtgcaaaaaagaagcaaaaggacttcagtgtg

SEQ ID NO: 3929 - RNA, 140 nt, synthetic construct
  source 1..140: mol_type = other RNA; note = pegRNA
ggtgtcacactgaagtccttgttttagagctagaaatagcaagttaaaataaggctagtccgttatcaacttgaaaaagtggcaccgagtcggtgctgggcagtgtgagtgcaaaaaagaagcaaaaggacttcagtttt

SEQ ID NO: 3930 - RNA, 140 nt, synthetic construct
  source 1..140: mol_type = other RNA; note = pegRNA
ggtgtcacactgaagtccttgttttagagctagaaatagcaagttaaaataaggctagtccgttatcaacttgaaaaagtggcaccgagtcggtgctgggcagtgtgagtgcaaaaaagaagccaaaggacttcagtgtg

SEQ ID NO: 3931 - RNA, 140 nt, synthetic construct
  source 1..140: mol_type = other RNA; note = pegRNA
ggtgtcacactgaagtccttgttttagagctagaaatagcaagttaaaataaggctagtccgttatcaacttgaaaaagtggcaccgagtcggtgctgggcagtgtgagtgcaaaaaagaagccaaaggacttcagtttt

SEQ ID NO: 3932 - RNA, 140 nt, synthetic construct
  source 1..140: mol_type = other RNA; note = pegRNA
ggtgtcacactgaagtccttgttttagagctagaaatagcaagttaaaataaggctagtccgttatcaacttgaaaaagtggcaccgagtcggtgctgggcagtgtgagtgcaaaaaagaagcgaaaggacttcagtgtg

SEQ ID NO: 3933 - RNA, 140 nt, synthetic construct
  source 1..140: mol_type = other RNA; note = pegRNA
ggtgtcacactgaagtccttgttttagagctagaaatagcaagttaaaataaggctagtccgttatcaacttgaaaaagtggcaccgagtcggtgctgggcagtgtgagtgcaaaaaagaagcgaaaggacttcagtttt

SEQ ID NO: 3934 - RNA, 140 nt, synthetic construct
  source 1..140: mol_type = other RNA; note = pegRNA
ggtgtcacactgaagtccttgttttagagctagaaatagcaagttaaaataaggctagtccgttatcaacttgaaaaagtggcaccgagtcggtgctgggcagtgtgagtgcaaaaaagaagctaaaggacttcagtgtg

SEQ ID NO: 3935 - RNA, 140 nt, synthetic construct
  source 1..140: mol_type = other RNA; note = pegRNA
ggtgtcacactgaagtccttgttttagagctagaaatagcaagttaaaataaggctagtccgttatcaacttgaaaaagtggcaccgagtcggtgctgggcagtgtgagtgcaaaaaagaagctaaaggacttcagtttt

SEQ ID NO: 3936 - RNA, 141 nt, synthetic construct
  source 1..141: mol_type = other RNA; note = pegRNA
ggtgtcacactgaagtccttgttttagagctagaaatagcaagttaaaataaggctagtccgttatcaacttgaaaaagtggcaccgagtcggtgcactctgggcagtgtgagtgcaaaaaagaagcaaaaggacttcagt

SEQ ID NO: 3937 - RNA, 141 nt, synthetic construct
  source 1..141: mol_type = other RNA; note = pegRNA
ggtgtcacactgaagtccttgttttagagctagaaatagcaagttaaaataaggctagtccgttatcaacttgaaaaagtggcaccgagtcggtgcactctgggcagtgtgagtgcaaaaaagaagcgaaaggacttcagt

SEQ ID NO: 3938 - RNA, 141 nt, synthetic construct
  source 1..141: mol_type = other RNA; note = pegRNA
ggtgtcacactgaagtccttgttttagagctagaaatagcaagttaaaataaggctagtccgttatcaacttgaaaaagtggcaccgagtcggtgcactctgggcagtgtgagtgcaaaaaagaagctaaaggacttcagt

SEQ ID NO: 3939 - RNA, 141 nt, synthetic construct
  source 1..141: mol_type = other RNA; note = pegRNA
ggtgtcacactgaagtccttgttttagagctagaaatagcaagttaaaataaggctagtccgttatcaacttgaaaaagtggcaccgagtcggtgcagtgtgagtgcaaaaaagaagcaaaaggacttcagtgtgactttt

SEQ ID NO: 3940 - RNA, 141 nt, synthetic construct
  source 1..141: mol_type = other RNA; note = pegRNA
ggtgtcacactgaagtccttgttttagagctagaaatagcaagttaaaataaggctagtccgttatcaacttgaaaaagtggcaccgagtcggtgcagtgtgagtgcaaaaaagaagcgaaaggacttcagtgtgactttt

SEQ ID NO: 3941 - RNA, 141 nt, synthetic construct
  source 1..141: mol_type = other RNA; note = pegRNA
ggtgtcacactgaagtccttgttttagagctagaaatagcaagttaaaataaggctagtccgttatcaacttgaaaaagtggcaccgagtcggtgcagtgtgagtgcaaaaaagaagctaaaggacttcagtgtgactttt

SEQ ID NO: 3942 - RNA, 141 nt, synthetic construct
  source 1..141: mol_type = other RNA; note = pegRNA
ggtgtcacactgaagtccttgttttagagctagaaatagcaagttaaaataaggctagtccgttatcaacttgaaaaagtggcaccgagtcggtgccactctgggcagtgtgagtgcaaaaaagaagcaaaaggacttcag

SEQ ID NO: 3943 - RNA, 141 nt, synthetic construct
  source 1..141: mol_type = other RNA; note = pegRNA
ggtgtcacactgaagtccttgttttagagctagaaatagcaagttaaaataaggctagtccgttatcaacttgaaaaagtggcaccgagtcggtgccactctgggcagtgtgagtgcaaaaaagaagcgaaaggacttcag

SEQ ID NO: 3944 - RNA, 141 nt, synthetic construct
  source 1..141: mol_type = other RNA; note = pegRNA
ggtgtcacactgaagtccttgttttagagctagaaatagcaagttaaaataaggctagtccgttatcaacttgaaaaagtggcaccgagtcggtgccactctgggcagtgtgagtgcaaaaaagaagctaaaggacttcag

SEQ ID NO: 3945 - RNA, 141 nt, synthetic construct
  source 1..141: mol_type = other RNA; note = pegRNA
ggtgtcacactgaagtccttgttttagagctagaaatagcaagttaaaataaggctagtccgttatcaacttgaaaaagtggcaccgagtcggtgccagtgtgagtgcaaaaaagaagcaaaaggacttcagtgtgatttt

SEQ ID NO: 3946 - RNA, 141 nt, synthetic construct
  source 1..141: mol_type = other RNA; note = pegRNA
ggtgtcacactgaagtccttgttttagagctagaaatagcaagttaaaataaggctagtccgttatcaacttgaaaaagtggcaccgagtcggtgccagtgtgagtgcaaaaaagaagcgaaaggacttcagtgtgatttt

SEQ ID NO: 3947 - RNA, 141 nt, synthetic construct
  source 1..141: mol_type = other RNA; note = pegRNA
ggtgtcacactgaagtccttgttttagagctagaaatagcaagttaaaataaggctagtccgttatcaacttgaaaaagtggcaccgagtcggtgccagtgtgagtgcaaaaaagaagctaaaggacttcagtgtgatttt

SEQ ID NO: 3948 - RNA, 141 nt, synthetic construct
  source 1..141: mol_type = other RNA; note = pegRNA
ggtgtcacactgaagtccttgttttagagctagaaatagcaagttaaaataaggctagtccgttatcaacttgaaaaagtggcaccgagtcggtgcctctgggcagtgtgagtgcaaaaaagaagcaaaaggacttcagtg

SEQ ID NO: 3949 - RNA, 141 nt, synthetic construct
  source 1..141: mol_type = other RNA; note = pegRNA
ggtgtcacactgaagtccttgttttagagctagaaatagcaagttaaaataaggctagtccgttatcaacttgaaaaagtggcaccgagtcggtgcctctgggcagtgtgagtgcaaaaaagaagcgaaaggacttcagtg

SEQ ID NO: 3950 - RNA, 141 nt, synthetic construct
  source 1..141: mol_type = other RNA; note = pegRNA
ggtgtcacactgaagtccttgttttagagctagaaatagcaagttaaaataaggctagtccgttatcaacttgaaaaagtggcaccgagtcggtgcctctgggcagtgtgagtgcaaaaaagaagctaaaggacttcagtg

SEQ ID NO: 3951 - RNA, 141 nt, synthetic construct
  source 1..141: mol_type = other RNA; note = pegRNA
ggtgtcacactgaagtccttgttttagagctagaaatagcaagttaaaataaggctagtccgttatcaacttgaaaaagtggcaccgagtcggtgcctgggcagtgtgagtgcaaaaaagaagcaaaaggacttcagtgtg

SEQ ID NO: 3952 - RNA, 141 nt, synthetic construct
  source 1..141: mol_type = other RNA; note = pegRNA
ggtgtcacactgaagtccttgttttagagctagaaatagcaagttaaaataaggctagtccgttatcaacttgaaaaagtggcaccgagtcggtgcctgggcagtgtgagtgcaaaaaagaagcaaaaggacttcagtttt

SEQ ID NO: 3953 - RNA, 141 nt, synthetic construct
  source 1..141: mol_type = other RNA; note = pegRNA
ggtgtcacactgaagtccttgttttagagctagaaatagcaagttaaaataaggctagtccgttatcaacttgaaaaagtggcaccgagtcggtgcctgggcagtgtgagtgcaaaaaagaagcgaaaggacttcagtgtg

SEQ ID NO: 3954 - RNA, 141 nt, synthetic construct
  source 1..141: mol_type = other RNA; note = pegRNA
ggtgtcacactgaagtccttgttttagagctagaaatagcaagttaaaataaggctagtccgttatcaacttgaaaaagtggcaccgagtcggtgcctgggcagtgtgagtgcaaaaaagaagcgaaaggacttcagtttt

SEQ ID NO: 3955 - RNA, 141 nt, synthetic construct
  source 1..141: mol_type = other RNA; note = pegRNA
ggtgtcacactgaagtccttgttttagagctagaaatagcaagttaaaataaggctagtccgttatcaacttgaaaaagtggcaccgagtcggtgcctgggcagtgtgagtgcaaaaaagaagctaaaggacttcagtgtg

SEQ ID NO: 3956 - RNA, 141 nt, synthetic construct
  source 1..141: mol_type = other RNA; note = pegRNA
ggtgtcacactgaagtccttgttttagagctagaaatagcaagttaaaataaggctagtccgttatcaacttgaaaaagtggcaccgagtcggtgcctgggcagtgtgagtgcaaaaaagaagctaaaggacttcagtttt

SEQ ID NO: 3957 - RNA, 141 nt, synthetic construct
  source 1..141: mol_type = other RNA; note = pegRNA
ggtgtcacactgaagtccttgttttagagctagaaatagcaagttaaaataaggctagtccgttatcaacttgaaaaagtggcaccgagtcggtgcgcagtgtgagtgcaaaaaagaagcaaaaggacttcagtgtgacac

SEQ ID NO: 3958 - RNA, 141 nt, synthetic construct
  source 1..141: mol_type = other RNA; note = pegRNA
ggtgtcacactgaagtccttgttttagagctagaaatagcaagttaaaataaggctagtccgttatcaacttgaaaaagtggcaccgagtcggtgcgcagtgtgagtgcaaaaaagaagcaaaaggacttcagtgtgtttt

SEQ ID NO: 3959 - RNA, 141 nt, synthetic construct
  source 1..141: mol_type = other RNA; note = pegRNA
ggtgtcacactgaagtccttgttttagagctagaaatagcaagttaaaataaggctagtccgttatcaacttgaaaaagtggcaccgagtcggtgcgcagtgtgagtgcaaaaaagaagccaaaggacttcagtgtgtttt

SEQ ID NO: 3960 - RNA, 141 nt, synthetic construct
  source 1..141: mol_type = other RNA; note = pegRNA
ggtgtcacactgaagtccttgttttagagctagaaatagcaagttaaaataaggctagtccgttatcaacttgaaaaagtggcaccgagtcggtgcgcagtgtgagtgcaaaaaagaagcgaaaggacttcagtgtgacac

SEQ ID NO: 3961 - RNA, 141 nt, synthetic construct
  source 1..141: mol_type = other RNA; note = pegRNA
ggtgtcacactgaagtccttgttttagagctagaaatagcaagttaaaataaggctagtccgttatcaacttgaaaaagtggcaccgagtcggtgcgcagtgtgagtgcaaaaaagaagcgaaaggacttcagtgtgtttt

SEQ ID NO: 3962 - RNA, 141 nt, synthetic construct
  source 1..141: mol_type = other RNA; note = pegRNA
ggtgtcacactgaagtccttgttttagagctagaaatagcaagttaaaataaggctagtccgttatcaacttgaaaaagtggcaccgagtcggtgcgcagtgtgagtgcaaaaaagaagctaaaggacttcagtgtgacac

SEQ ID NO: 3963 - RNA, 141 nt, synthetic construct
  source 1..141: mol_type = other RNA; note = pegRNA
ggtgtcacactgaagtccttgttttagagctagaaatagcaagttaaaataaggctagtccgttatcaacttgaaaaagtggcaccgagtcggtgcgcagtgtgagtgcaaaaaagaagctaaaggacttcagtgtgtttt

SEQ ID NO: 3964 - RNA, 141 nt, synthetic construct
  source 1..141: mol_type = other RNA; note = pegRNA
ggtgtcacactgaagtccttgttttagagctagaaatagcaagttaaaataaggctagtccgttatcaacttgaaaaagtggcaccgagtcggtgcggcagtgtgagtgcaaaaaagaagcaaaaggacttcagtgtgaca

SEQ ID NO: 3965 - RNA, 141 nt, synthetic construct
  source 1..141: mol_type = other RNA; note = pegRNA
ggtgtcacactgaagtccttgttttagagctagaaatagcaagttaaaataaggctagtccgttatcaacttgaaaaagtggcaccgagtcggtgcggcagtgtgagtgcaaaaaagaagcaaaaggacttcagtgttttt

SEQ ID NO: 3966 - RNA, 141 nt, synthetic construct
  source 1..141: mol_type = other RNA; note = pegRNA
ggtgtcacactgaagtccttgttttagagctagaaatagcaagttaaaataaggctagtccgttatcaacttgaaaaagtggcaccgagtcggtgcggcagtgtgagtgcaaaaaagaagcgaaaggacttcagtgtgaca

SEQ ID NO: 3967 - RNA, 141 nt, synthetic construct
  source 1..141: mol_type = other RNA; note = pegRNA
ggtgtcacactgaagtccttgttttagagctagaaatagcaagttaaaataaggctagtccgttatcaacttgaaaaagtggcaccgagtcggtgcggcagtgtgagtgcaaaaaagaagcgaaaggacttcagtgttttt

SEQ ID NO: 3968 - RNA, 141 nt, synthetic construct
  source 1..141: mol_type = other RNA; note = pegRNA
ggtgtcacactgaagtccttgttttagagctagaaatagcaagttaaaataaggctagtccgttatcaacttgaaaaagtggcaccgagtcggtgcggcagtgtgagtgcaaaaaagaagctaaaggacttcagtgtgaca

SEQ ID NO: 3969 - RNA, 141 nt, synthetic construct
  source 1..141: mol_type = other RNA; note = pegRNA
ggtgtcacactgaagtccttgttttagagctagaaatagcaagttaaaataaggctagtccgttatcaacttgaaaaagtggcaccgagtcggtgcggcagtgtgagtgcaaaaaagaagctaaaggacttcagtgttttt

SEQ ID NO: 3970 - RNA, 141 nt, synthetic construct
  source 1..141: mol_type = other RNA; note = pegRNA
ggtgtcacactgaagtccttgttttagagctagaaatagcaagttaaaataaggctagtccgttatcaacttgaaaaagtggcaccgagtcggtgcgggcagtgtgagtgcaaaaaagaagcaaaaggacttcagtgtgac

SEQ ID NO: 3971 - RNA, 141 nt, synthetic construct
  source 1..141: mol_type = other RNA; note = pegRNA
ggtgtcacactgaagtccttgttttagagctagaaatagcaagttaaaataaggctagtccgttatcaacttgaaaaagtggcaccgagtcggtgcgggcagtgtgagtgcaaaaaagaagcaaaaggacttcagtgtttt

SEQ ID NO: 3972 - RNA, 141 nt, synthetic construct
  source 1..141: mol_type = other RNA; note = pegRNA
ggtgtcacactgaagtccttgttttagagctagaaatagcaagttaaaataaggctagtccgttatcaacttgaaaaagtggcaccgagtcggtgcgggcagtgtgagtgcaaaaaagaagcgaaaggacttcagtgtgac

SEQ ID NO: 3973 - RNA, 141 nt, synthetic construct
  source 1..141: mol_type = other RNA; note = pegRNA
ggtgtcacactgaagtccttgttttagagctagaaatagcaagttaaaataaggctagtccgttatcaacttgaaaaagtggcaccgagtcggtgcgggcagtgtgagtgcaaaaaagaagcgaaaggacttcagtgtttt

SEQ ID NO: 3974 - RNA, 141 nt, synthetic construct
  source 1..141: mol_type = other RNA; note = pegRNA
ggtgtcacactgaagtccttgttttagagctagaaatagcaagttaaaataaggctagtccgttatcaacttgaaaaagtggcaccgagtcggtgcgggcagtgtgagtgcaaaaaagaagctaaaggacttcagtgtgac

SEQ ID NO: 3975 - RNA, 141 nt, synthetic construct
  source 1..141: mol_type = other RNA; note = pegRNA
ggtgtcacactgaagtccttgttttagagctagaaatagcaagttaaaataaggctagtccgttatcaacttgaaaaagtggcaccgagtcggtgcgggcagtgtgagtgcaaaaaagaagctaaaggacttcagtgtttt

SEQ ID NO: 3976 - RNA, 141 nt, synthetic construct
  source 1..141: mol_type = other RNA; note = pegRNA
ggtgtcacactgaagtccttgttttagagctagaaatagcaagttaaaataaggctagtccgttatcaacttgaaaaagtggcaccgagtcggtgcgtgtgagtgcaaaaaagaagcaaaaggacttcagtgtgacatttt

SEQ ID NO: 3977 - RNA, 141 nt, synthetic construct
  source 1..141: mol_type = other RNA; note = pegRNA
ggtgtcacactgaagtccttgttttagagctagaaatagcaagttaaaataaggctagtccgttatcaacttgaaaaagtggcaccgagtcggtgcgtgtgagtgcaaaaaagaagcgaaaggacttcagtgtgacatttt

SEQ ID NO: 3978 - RNA, 141 nt, synthetic construct
  source 1..141: mol_type = other RNA; note = pegRNA
ggtgtcacactgaagtccttgttttagagctagaaatagcaagttaaaataaggctagtccgttatcaacttgaaaaagtggcaccgagtcggtgcgtgtgagtgcaaaaaagaagctaaaggacttcagtgtgacatttt

SEQ ID NO: 3979 - RNA, 141 nt, synthetic construct
  source 1..141: mol_type = other RNA; note = pegRNA
ggtgtcacactgaagtccttgttttagagctagaaatagcaagttaaaataaggctagtccgttatcaacttgaaaaagtggcaccgagtcggtgctctgggcagtgtgagtgcaaaaaagaagcaaaaggacttcagtgt

SEQ ID NO: 3980 - RNA, 141 nt, synthetic construct
  source 1..141: mol_type = other RNA; note = pegRNA
ggtgtcacactgaagtccttgttttagagctagaaatagcaagttaaaataaggctagtccgttatcaacttgaaaaagtggcaccgagtcggtgctctgggcagtgtgagtgcaaaaaagaagcgaaaggacttcagtgt

SEQ ID NO: 3981 - RNA, 141 nt, synthetic construct
  source 1..141: mol_type = other RNA; note = pegRNA
ggtgtcacactgaagtccttgttttagagctagaaatagcaagttaaaataaggctagtccgttatcaacttgaaaaagtggcaccgagtcggtgctctgggcagtgtgagtgcaaaaaagaagctaaaggacttcagtgt

SEQ ID NO: 3982 - RNA, 141 nt, synthetic construct
  source 1..141: mol_type = other RNA; note = pegRNA
ggtgtcacactgaagtccttgttttagagctagaaatagcaagttaaaataaggctagtccgttatcaacttgaaaaagtggcaccgagtcggtgctgggcagtgtgagtgcaaaaaagaagcaaaaggacttcagtgtga

SEQ ID NO: 3983 - RNA, 141 nt, synthetic construct
  source 1..141: mol_type = other RNA; note = pegRNA
ggtgtcacactgaagtccttgttttagagctagaaatagcaagttaaaataaggctagtccgttatcaacttgaaaaagtggcaccgagtcggtgctgggcagtgtgagtgcaaaaaagaagcaaaaggacttcagttttt

SEQ ID NO: 3984 - RNA, 141 nt, synthetic construct
  source 1..141: mol_type = other RNA; note = pegRNA
ggtgtcacactgaagtccttgttttagagctagaaatagcaagttaaaataaggctagtccgttatcaacttgaaaaagtggcaccgagtcggtgctgggcagtgtgagtgcaaaaaagaagcgaaaggacttcagtgtga

SEQ ID NO: 3985 - RNA, 141 nt, synthetic construct
  source 1..141: mol_type = other RNA; note = pegRNA
ggtgtcacactgaagtccttgttttagagctagaaatagcaagttaaaataaggctagtccgttatcaacttgaaaaagtggcaccgagtcggtgctgggcagtgtgagtgcaaaaaagaagcgaaaggacttcagttttt

SEQ ID NO: 3986 - RNA, 141 nt, synthetic construct
  source 1..141: mol_type = other RNA; note = pegRNA
ggtgtcacactgaagtccttgttttagagctagaaatagcaagttaaaataaggctagtccgttatcaacttgaaaaagtggcaccgagtcggtgctgggcagtgtgagtgcaaaaaagaagctaaaggacttcagtgtga

SEQ ID NO: 3987 - RNA, 141 nt, synthetic construct
  source 1..141: mol_type = other RNA; note = pegRNA
ggtgtcacactgaagtccttgttttagagctagaaatagcaagttaaaataaggctagtccgttatcaacttgaaaaagtggcaccgagtcggtgctgggcagtgtgagtgcaaaaaagaagctaaaggacttcagttttt

SEQ ID NO: 3988 - RNA, 142 nt, synthetic construct
  source 1..142: mol_type = other RNA; note = pegRNA
ggtgtcacactgaagtccttgttttagagctagaaatagcaagttaaaataaggctagtccgttatcaacttgaaaaagtggcaccgagtcggtgcactctgggcagtgtgagtgcaaaaaagaagcaaaaggacttcagtg

SEQ ID NO: 3989 - RNA, 142 nt, synthetic construct
  source 1..142: mol_type = other RNA; note = pegRNA
ggtgtcacactgaagtccttgttttagagctagaaatagcaagttaaaataaggctagtccgttatcaacttgaaaaagtggcaccgagtcggtgcactctgggcagtgtgagtgcaaaaaagaagcgaaaggacttcagtg

SEQ ID NO: 3990 - RNA, 142 nt, synthetic construct
  source 1..142: mol_type = other RNA; note = pegRNA
ggtgtcacactgaagtccttgttttagagctagaaatagcaagttaaaataaggctagtccgttatcaacttgaaaaagtggcaccgagtcggtgcactctgggcagtgtgagtgcaaaaaagaagctaaaggacttcagtg

SEQ ID NO: 3991 - RNA, 142 nt, synthetic construct
  source 1..142: mol_type = other RNA; note = pegRNA
ggtgtcacactgaagtccttgttttagagctagaaatagcaagttaaaataaggctagtccgttatcaacttgaaaaagtggcaccgagtcggtgcagtgtgagtgcaaaaaagaagcaaaaggacttcagtgtgacatttt

SEQ ID NO: 3992 - RNA, 142 nt, synthetic construct
  source 1..142: mol_type = other RNA; note = pegRNA
ggtgtcacactgaagtccttgttttagagctagaaatagcaagttaaaataaggctagtccgttatcaacttgaaaaagtggcaccgagtcggtgcagtgtgagtgcaaaaaagaagcgaaaggacttcagtgtgacatttt

SEQ ID NO: 3993 - RNA, 142 nt, synthetic construct
  source 1..142: mol_type = other RNA; note = pegRNA
ggtgtcacactgaagtccttgttttagagctagaaatagcaagttaaaataaggctagtccgttatcaacttgaaaaagtggcaccgagtcggtgcagtgtgagtgcaaaaaagaagctaaaggacttcagtgtgacatttt

SEQ ID NO: 3994 - RNA, 142 nt, synthetic construct
  source 1..142: mol_type = other RNA; note = pegRNA
ggtgtcacactgaagtccttgttttagagctagaaatagcaagttaaaataaggctagtccgttatcaacttgaaaaagtggcaccgagtcggtgccactctgggcagtgtgagtgcaaaaaagaagcaaaaggacttcagt

SEQ ID NO: 3995 - RNA, 142 nt, synthetic construct
  source 1..142: mol_type = other RNA; note = pegRNA
ggtgtcacactgaagtccttgttttagagctagaaatagcaagttaaaataaggctagtccgttatcaacttgaaaaagtggcaccgagtcggtgccactctgggcagtgtgagtgcaaaaaagaagcgaaaggacttcagt

SEQ ID NO: 3996 - RNA, 142 nt, synthetic construct
  source 1..142: mol_type = other RNA; note = pegRNA
ggtgtcacactgaagtccttgttttagagctagaaatagcaagttaaaataaggctagtccgttatcaacttgaaaaagtggcaccgagtcggtgccactctgggcagtgtgagtgcaaaaaagaagctaaaggacttcagt

SEQ ID NO: 3997 - RNA, 142 nt, synthetic construct
  source 1..142: mol_type = other RNA; note = pegRNA
ggtgtcacactgaagtccttgttttagagctagaaatagcaagttaaaataaggctagtccgttatcaacttgaaaaagtggcaccgagtcggtgccagtgtgagtgcaaaaaagaagcaaaaggacttcagtgtgactttt

SEQ ID NO: 3998 - RNA, 142 nt, synthetic construct
  source 1..142: mol_type = other RNA; note = pegRNA
ggtgtcacactgaagtccttgttttagagctagaaatagcaagttaaaataaggctagtccgttatcaacttgaaaaagtggcaccgagtcggtgccagtgtgagtgcaaaaaagaagcgaaaggacttcagtgtgactttt

SEQ ID NO: 3999 - RNA, 142 nt, synthetic construct
  source 1..142: mol_type = other RNA; note = pegRNA
ggtgtcacactgaagtccttgttttagagctagaaatagcaagttaaaataaggctagtccgttatcaacttgaaaaagtggcaccgagtcggtgccagtgtgagtgcaaaaaagaagctaaaggacttcagtgtgactttt

SEQ ID NO: 4000 - RNA, 142 nt, synthetic construct
  source 1..142: mol_type = other RNA; note = pegRNA
ggtgtcacactgaagtccttgttttagagctagaaatagcaagttaaaataaggctagtccgttatcaacttgaaaaagtggcaccgagtcggtgcctctgggcagtgtgagtgcaaaaaagaagcaaaaggacttcagtgt

SEQ ID NO: 4001 - RNA, 142 nt, synthetic construct
  source 1..142: mol_type = other RNA; note = pegRNA
ggtgtcacactgaagtccttgttttagagctagaaatagcaagttaaaataaggctagtccgttatcaacttgaaaaagtggcaccgagtcggtgcctctgggcagtgtgagtgcaaaaaagaagcgaaaggacttcagtgt

SEQ ID NO: 4002 - RNA, 142 nt, synthetic construct
  source 1..142: mol_type = other RNA; note = pegRNA
ggtgtcacactgaagtccttgttttagagctagaaatagcaagttaaaataaggctagtccgttatcaacttgaaaaagtggcaccgagtcggtgcctctgggcagtgtgagtgcaaaaaagaagctaaaggacttcagtgt

SEQ ID NO: 4003 - RNA, 142 nt, synthetic construct
  source 1..142: mol_type = other RNA; note = pegRNA
ggtgtcacactgaagtccttgttttagagctagaaatagcaagttaaaataaggctagtccgttatcaacttgaaaaagtggcaccgagtcggtgcctgggcagtgtgagtgcaaaaaagaagcaaaaggacttcagtgtga

SEQ ID NO: 4004 - RNA, 142 nt, synthetic construct
  source 1..142: mol_type = other RNA; note = pegRNA
ggtgtcacactgaagtccttgttttagagctagaaatagcaagttaaaataaggctagtccgttatcaacttgaaaaagtggcaccgagtcggtgcctgggcagtgtgagtgcaaaaaagaagcaaaaggacttcagttttt

SEQ ID NO: 4005 - RNA, 142 nt, synthetic construct
  source 1..142: mol_type = other RNA; note = pegRNA
ggtgtcacactgaagtccttgttttagagctagaaatagcaagttaaaataaggctagtccgttatcaacttgaaaaagtggcaccgagtcggtgcctgggcagtgtgagtgcaaaaaagaagcgaaaggacttcagtgtga

SEQ ID NO: 4006 - RNA, 142 nt, synthetic construct
  source 1..142: mol_type = other RNA; note = pegRNA
ggtgtcacactgaagtccttgttttagagctagaaatagcaagttaaaataaggctagtccgttatcaacttgaaaaagtggcaccgagtcggtgcctgggcagtgtgagtgcaaaaaagaagcgaaaggacttcagttttt

SEQ ID NO: 4007 - RNA, 142 nt, synthetic construct
  source 1..142: mol_type = other RNA; note = pegRNA
ggtgtcacactgaagtccttgttttagagctagaaatagcaagttaaaataaggctagtccgttatcaacttgaaaaagtggcaccgagtcggtgcctgggcagtgtgagtgcaaaaaagaagctaaaggacttcagtgtga

SEQ ID NO: 4008 - RNA, 142 nt, synthetic construct
  source 1..142: mol_type = other RNA; note = pegRNA
ggtgtcacactgaagtccttgttttagagctagaaatagcaagttaaaataaggctagtccgttatcaacttgaaaaagtggcaccgagtcggtgcctgggcagtgtgagtgcaaaaaagaagctaaaggacttcagttttt

SEQ ID NO: 4009 - RNA, 142 nt, synthetic construct
  source 1..142: mol_type = other RNA; note = pegRNA
ggtgtcacactgaagtccttgttttagagctagaaatagcaagttaaaataaggctagtccgttatcaacttgaaaaagtggcaccgagtcggtgcgcagtgtgagtgcaaaaaagaagcaaaaggacttcagtgtgatttt

SEQ ID NO: 4010 - RNA, 142 nt, synthetic construct
  source 1..142: mol_type = other RNA; note = pegRNA
ggtgtcacactgaagtccttgttttagagctagaaatagcaagttaaaataaggctagtccgttatcaacttgaaaaagtggcaccgagtcggtgcgcagtgtgagtgcaaaaaagaagcgaaaggacttcagtgtgatttt

SEQ ID NO: 4011 - RNA, 142 nt, synthetic construct
  source 1..142: mol_type = other RNA; note = pegRNA
ggtgtcacactgaagtccttgttttagagctagaaatagcaagttaaaataaggctagtccgttatcaacttgaaaaagtggcaccgagtcggtgcgcagtgtgagtgcaaaaaagaagctaaaggacttcagtgtgatttt

SEQ ID NO: 4012 - RNA, 142 nt, synthetic construct
  source 1..142: mol_type = other RNA; note = pegRNA
ggtgtcacactgaagtccttgttttagagctagaaatagcaagttaaaataaggctagtccgttatcaacttgaaaaagtggcaccgagtcggtgcggcagtgtgagtgcaaaaaagaagcaaaaggacttcagtgtgacac

SEQ ID NO: 4013 - RNA, 142 nt, synthetic construct
  source 1..142: mol_type = other RNA; note = pegRNA
ggtgtcacactgaagtccttgttttagagctagaaatagcaagttaaaataaggctagtccgttatcaacttgaaaaagtggcaccgagtcggtgcggcagtgtgagtgcaaaaaagaagcaaaaggacttcagtgtgtttt

SEQ ID NO: 4014 - RNA, 142 nt, synthetic construct
  source 1..142: mol_type = other RNA; note = pegRNA
ggtgtcacactgaagtccttgttttagagctagaaatagcaagttaaaataaggctagtccgttatcaacttgaaaaagtggcaccgagtcggtgcggcagtgtgagtgcaaaaaagaagccaaaggacttcagtgtgtttt

SEQ ID NO: 4015 - RNA, 142 nt, synthetic construct
  source 1..142: mol_type = other RNA; note = pegRNA
ggtgtcacactgaagtccttgttttagagctagaaatagcaagttaaaataaggctagtccgttatcaacttgaaaaagtggcaccgagtcggtgcggcagtgtgagtgcaaaaaagaagcgaaaggacttcagtgtgacac

SEQ ID NO: 4016 - RNA, 142 nt, synthetic construct
  source 1..142: mol_type = other RNA; note = pegRNA
ggtgtcacactgaagtccttgttttagagctagaaatagcaagttaaaataaggctagtccgttatcaacttgaaaaagtggcaccgagtcggtgcggcagtgtgagtgcaaaaaagaagcgaaaggacttcagtgtgtttt

SEQ ID NO: 4017 - RNA, 142 nt, synthetic construct
  source 1..142: mol_type = other RNA; note = pegRNA
ggtgtcacactgaagtccttgttttagagctagaaatagcaagttaaaataaggctagtccgttatcaacttgaaaaagtggcaccgagtcggtgcggcagtgtgagtgcaaaaaagaagctaaaggacttcagtgtgacac

SEQ ID NO: 4018 - RNA, 142 nt, synthetic construct
  source 1..142: mol_type = other RNA; note = pegRNA
ggtgtcacactgaagtccttgttttagagctagaaatagcaagttaaaataaggctagtccgttatcaacttgaaaaagtggcaccgagtcggtgcggcagtgtgagtgcaaaaaagaagctaaaggacttcagtgtgtttt

SEQ ID NO: 4019 - RNA, 142 nt, synthetic construct
  source 1..142: mol_type = other RNA; note = pegRNA
ggtgtcacactgaagtccttgttttagagctagaaatagcaagttaaaataaggctagtccgttatcaacttgaaaaagtggcaccgagtcggtgcgggcagtgtgagtgcaaaaaagaagcaaaaggacttcagtgtgaca

SEQ ID NO: 4020 - RNA, 142 nt, synthetic construct
  source 1..142: mol_type = other RNA; note = pegRNA
ggtgtcacactgaagtccttgttttagagctagaaatagcaagttaaaataaggctagtccgttatcaacttgaaaaagtggcaccgagtcggtgcgggcagtgtgagtgcaaaaaagaagcaaaaggacttcagtgttttt

SEQ ID NO: 4021 - RNA, 142 nt, synthetic construct
  source 1..142: mol_type = other RNA; note = pegRNA
ggtgtcacactgaagtccttgttttagagctagaaatagcaagttaaaataaggctagtccgttatcaacttgaaaaagtggcaccgagtcggtgcgggcagtgtgagtgcaaaaaagaagcgaaaggacttcagtgtgaca

SEQ ID NO: 4022 - RNA, 142 nt, synthetic construct
  source 1..142: mol_type = other RNA; note = pegRNA
ggtgtcacactgaagtccttgttttagagctagaaatagcaagttaaaataaggctagtccgttatcaacttgaaaaagtggcaccgagtcggtgcgggcagtgtgagtgcaaaaaagaagcgaaaggacttcagtgttttt

SEQ ID NO: 4023 - RNA, 142 nt, synthetic construct
  source 1..142: mol_type = other RNA; note = pegRNA
ggtgtcacactgaagtccttgttttagagctagaaatagcaagttaaaataaggctagtccgttatcaacttgaaaaagtggcaccgagtcggtgcgggcagtgtgagtgcaaaaaagaagctaaaggacttcagtgtgaca

SEQ ID NO: 4024 - RNA, 142 nt, synthetic construct
  source 1..142: mol_type = other RNA; note = pegRNA
ggtgtcacactgaagtccttgttttagagctagaaatagcaagttaaaataaggctagtccgttatcaacttgaaaaagtggcaccgagtcggtgcgggcagtgtgagtgcaaaaaagaagctaaaggacttcagtgttttt

SEQ ID NO: 4025 - RNA, 142 nt, synthetic construct
  source 1..142: mol_type = other RNA; note = pegRNA
ggtgtcacactgaagtccttgttttagagctagaaatagcaagttaaaataaggctagtccgttatcaacttgaaaaagtggcaccgagtcggtgcgtgtgagtgcaaaaaagaagcaaaaggacttcagtgtgacactttt

SEQ ID NO: 4026 - RNA, 142 nt, synthetic construct
  source 1..142: mol_type = other RNA; note = pegRNA
ggtgtcacactgaagtccttgttttagagctagaaatagcaagttaaaataaggctagtccgttatcaacttgaaaaagtggcaccgagtcggtgcgtgtgagtgcaaaaaagaagcgaaaggacttcagtgtgacactttt

SEQ ID NO: 4027 - RNA, 142 nt, synthetic construct
  source 1..142: mol_type = other RNA; note = pegRNA
ggtgtcacactgaagtccttgttttagagctagaaatagcaagttaaaataaggctagtccgttatcaacttgaaaaagtggcaccgagtcggtgcgtgtgagtgcaaaaaagaagctaaaggacttcagtgtgacactttt

SEQ ID NO: 4028 - RNA, 142 nt, synthetic construct
  source 1..142: mol_type = other RNA; note = pegRNA
ggtgtcacactgaagtccttgttttagagctagaaatagcaagttaaaataaggctagtccgttatcaacttgaaaaagtggcaccgagtcggtgctcactctgggcagtgtgagtgcaaaaaagaagcaaaaggacttcag

SEQ ID NO: 4029 - RNA, 142 nt, synthetic construct
  source 1..142: mol_type = other RNA; note = pegRNA
ggtgtcacactgaagtccttgttttagagctagaaatagcaagttaaaataaggctagtccgttatcaacttgaaaaagtggcaccgagtcggtgctcactctgggcagtgtgagtgcaaaaaagaagcgaaaggacttcag

SEQ ID NO: 4030 - RNA, 142 nt, synthetic construct
  source 1..142: mol_type = other RNA; note = pegRNA
ggtgtcacactgaagtccttgttttagagctagaaatagcaagttaaaataaggctagtccgttatcaacttgaaaaagtggcaccgagtcggtgctcactctgggcagtgtgagtgcaaaaaagaagctaaaggacttcag

SEQ ID NO: 4031 - RNA, 142 nt, synthetic construct
  source 1..142: mol_type = other RNA; note = pegRNA
ggtgtcacactgaagtccttgttttagagctagaaatagcaagttaaaataaggctagtccgttatcaacttgaaaaagtggcaccgagtcggtgctctgggcagtgtgagtgcaaaaaagaagcaaaaggacttcagtgtg

SEQ ID NO: 4032 - RNA, 142 nt, synthetic construct
  source 1..142: mol_type = other RNA; note = pegRNA
ggtgtcacactgaagtccttgttttagagctagaaatagcaagttaaaataaggctagtccgttatcaacttgaaaaagtggcaccgagtcggtgctctgggcagtgtgagtgcaaaaaagaagcaaaaggacttcagtttt

SEQ ID NO: 4033 - RNA, 142 nt, synthetic construct
  source 1..142: mol_type = other RNA; note = pegRNA
ggtgtcacactgaagtccttgttttagagctagaaatagcaagttaaaataaggctagtccgttatcaacttgaaaaagtggcaccgagtcggtgctctgggcagtgtgagtgcaaaaaagaagcgaaaggacttcagtgtg

SEQ ID NO: 4034 - RNA, 142 nt, synthetic construct
  source 1..142: mol_type = other RNA; note = pegRNA
ggtgtcacactgaagtccttgttttagagctagaaatagcaagttaaaataaggctagtccgttatcaacttgaaaaagtggcaccgagtcggtgctctgggcagtgtgagtgcaaaaaagaagcgaaaggacttcagtttt

SEQ ID NO: 4035 - RNA, 142 nt, synthetic construct
  source 1..142: mol_type = other RNA; note = pegRNA
ggtgtcacactgaagtccttgttttagagctagaaatagcaagttaaaataaggctagtccgttatcaacttgaaaaagtggcaccgagtcggtgctctgggcagtgtgagtgcaaaaaagaagctaaaggacttcagtgtg

SEQ ID NO: 4036 - RNA, 142 nt, synthetic construct
  source 1..142: mol_type = other RNA; note = pegRNA
ggtgtcacactgaagtccttgttttagagctagaaatagcaagttaaaataaggctagtccgttatcaacttgaaaaagtggcaccgagtcggtgctctgggcagtgtgagtgcaaaaaagaagctaaaggacttcagtttt

SEQ ID NO: 4037 - RNA, 142 nt, synthetic construct
  source 1..142: mol_type = other RNA; note = pegRNA
ggtgtcacactgaagtccttgttttagagctagaaatagcaagttaaaataaggctagtccgttatcaacttgaaaaagtggcaccgagtcggtgctgggcagtgtgagtgcaaaaaagaagcaaaaggacttcagtgtgac

SEQ ID NO: 4038 - RNA, 142 nt, synthetic construct
  source 1..142: mol_type = other RNA; note = pegRNA
ggtgtcacactgaagtccttgttttagagctagaaatagcaagttaaaataaggctagtccgttatcaacttgaaaaagtggcaccgagtcggtgctgggcagtgtgagtgcaaaaaagaagcaaaaggacttcagtgtttt

SEQ ID NO: 4039 - RNA, 142 nt, synthetic construct
  source 1..142: mol_type = other RNA; note = pegRNA
ggtgtcacactgaagtccttgttttagagctagaaatagcaagttaaaataaggctagtccgttatcaacttgaaaaagtggcaccgagtcggtgctgggcagtgtgagtgcaaaaaagaagccaaaggacttcagtgtgac

SEQ ID NO: 4040 - RNA, 142 nt, synthetic construct
  source 1..142: mol_type = other RNA; note = pegRNA
ggtgtcacactgaagtccttgttttagagctagaaatagcaagttaaaataaggctagtccgttatcaacttgaaaaagtggcaccgagtcggtgctgggcagtgtgagtgcaaaaaagaagccaaaggacttcagtgtttt

SEQ ID NO: 4041 - RNA, 142 nt, synthetic construct
  source 1..142: mol_type = other RNA; note = pegRNA
ggtgtcacactgaagtccttgttttagagctagaaatagcaagttaaaataaggctagtccgttatcaacttgaaaaagtggcaccgagtcggtgctgggcagtgtgagtgcaaaaaagaagcgaaaggacttcagtgtgac

SEQ ID NO: 4042 - RNA, 142 nt, synthetic construct
  source 1..142: mol_type = other RNA; note = pegRNA
ggtgtcacactgaagtccttgttttagagctagaaatagcaagttaaaataaggctagtccgttatcaacttgaaaaagtggcaccgagtcggtgctgggcagtgtgagtgcaaaaaagaagcgaaaggacttcagtgtttt

SEQ ID NO: 4043 - RNA, 142 nt, synthetic construct
  source 1..142: mol_type = other RNA; note = pegRNA
ggtgtcacactgaagtccttgttttagagctagaaatagcaagttaaaataaggctagtccgttatcaacttgaaaaagtggcaccgagtcggtgctgggcagtgtgagtgcaaaaaagaagctaaaggacttcagtgtgac

SEQ ID NO: 4044 - RNA, 142 nt, synthetic construct
  source 1..142: mol_type = other RNA; note = pegRNA
ggtgtcacactgaagtccttgttttagagctagaaatagcaagttaaaataaggctagtccgttatcaacttgaaaaagtggcaccgagtcggtgctgggcagtgtgagtgcaaaaaagaagctaaaggacttcagtgtttt

SEQ ID NO: 4045 - RNA, 143 nt, synthetic construct
  source 1..143: mol_type = other RNA; note = pegRNA
ggtgtcacactgaagtccttgttttagagctagaaatagcaagttaaaataaggctagtccgttatcaacttgaaaaagtggcaccgagtcggtgcactctgggcagtgtgagtgcaaaaaagaagcaaaaggacttcagtgt

SEQ ID NO: 4046 - RNA, 143 nt, synthetic construct
  source 1..143: mol_type = other RNA; note = pegRNA
ggtgtcacactgaagtccttgttttagagctagaaatagcaagttaaaataaggctagtccgttatcaacttgaaaaagtggcaccgagtcggtgcactctgggcagtgtgagtgcaaaaaagaagcgaaaggacttcagtgt

SEQ ID NO: 4047 - RNA, 143 nt, synthetic construct
  source 1..143: mol_type = other RNA; note = pegRNA
ggtgtcacactgaagtccttgttttagagctagaaatagcaagttaaaataaggctagtccgttatcaacttgaaaaagtggcaccgagtcggtgcactctgggcagtgtgagtgcaaaaaagaagctaaaggacttcagtgt

SEQ ID NO: 4048 - RNA, 143 nt, synthetic construct
  source 1..143: mol_type = other RNA; note = pegRNA
ggtgtcacactgaagtccttgttttagagctagaaatagcaagttaaaataaggctagtccgttatcaacttgaaaaagtggcaccgagtcggtgcagtgtgagtgcaaaaaagaagcaaaaggacttcagtgtgacactttt

SEQ ID NO: 4049 - RNA, 143 nt, synthetic construct
  source 1..143: mol_type = other RNA; note = pegRNA
ggtgtcacactgaagtccttgttttagagctagaaatagcaagttaaaataaggctagtccgttatcaacttgaaaaagtggcaccgagtcggtgcagtgtgagtgcaaaaaagaagcgaaaggacttcagtgtgacactttt

SEQ ID NO: 4050 - RNA, 143 nt, synthetic construct
  source 1..143: mol_type = other RNA; note = pegRNA
ggtgtcacactgaagtccttgttttagagctagaaatagcaagttaaaataaggctagtccgttatcaacttgaaaaagtggcaccgagtcggtgcagtgtgagtgcaaaaaagaagctaaaggacttcagtgtgacactttt

SEQ ID NO: 4051 - RNA, 143 nt, synthetic construct
  source 1..143: mol_type = other RNA; note = pegRNA
ggtgtcacactgaagtccttgttttagagctagaaatagcaagttaaaataaggctagtccgttatcaacttgaaaaagtggcaccgagtcggtgccactctgggcagtgtgagtgcaaaaaagaagcaaaaggacttcagtg

SEQ ID NO: 4052 - RNA, 143 nt, synthetic construct
  source 1..143: mol_type = other RNA; note = pegRNA
ggtgtcacactgaagtccttgttttagagctagaaatagcaagttaaaataaggctagtccgttatcaacttgaaaaagtggcaccgagtcggtgccactctgggcagtgtgagtgcaaaaaagaagcgaaaggacttcagtg

SEQ ID NO: 4053 - RNA, 143 nt, synthetic construct
  source 1..143: mol_type = other RNA; note = pegRNA
ggtgtcacactgaagtccttgttttagagctagaaatagcaagttaaaataaggctagtccgttatcaacttgaaaaagtggcaccgagtcggtgccactctgggcagtgtgagtgcaaaaaagaagctaaaggacttcagtg

SEQ ID NO: 4054 - RNA, 143 nt, synthetic construct
  source 1..143: mol_type = other RNA; note = pegRNA
ggtgtcacactgaagtccttgttttagagctagaaatagcaagttaaaataaggctagtccgttatcaacttgaaaaagtggcaccgagtcggtgccagtgtgagtgcaaaaaagaagcaaaaggacttcagtgtgacatttt

SEQ ID NO: 4055 - RNA, 143 nt, synthetic construct
  source 1..143: mol_type = other RNA; note = pegRNA
ggtgtcacactgaagtccttgttttagagctagaaatagcaagttaaaataaggctagtccgttatcaacttgaaaaagtggcaccgagtcggtgccagtgtgagtgcaaaaaagaagcgaaaggacttcagtgtgacatttt

SEQ ID NO: 4056 - RNA, 143 nt, synthetic construct
  source 1..143: mol_type = other RNA; note = pegRNA
ggtgtcacactgaagtccttgttttagagctagaaatagcaagttaaaataaggctagtccgttatcaacttgaaaaagtggcaccgagtcggtgccagtgtgagtgcaaaaaagaagctaaaggacttcagtgtgacatttt

SEQ ID NO: 4057 - RNA, 143 nt, synthetic construct
  source 1..143: mol_type = other RNA; note = pegRNA
ggtgtcacactgaagtccttgttttagagctagaaatagcaagttaaaataaggctagtccgttatcaacttgaaaaagtggcaccgagtcggtgcctcactctgggcagtgtgagtgcaaaaaagaagcaaaaggacttcag

SEQ ID NO: 4058 - RNA, 143 nt, synthetic construct
  source 1..143: mol_type = other RNA; note = pegRNA
ggtgtcacactgaagtccttgttttagagctagaaatagcaagttaaaataaggctagtccgttatcaacttgaaaaagtggcaccgagtcggtgcctcactctgggcagtgtgagtgcaaaaaagaagcgaaaggacttcag

SEQ ID NO: 4059 - RNA, 143 nt, synthetic construct
  source 1..143: mol_type = other RNA; note = pegRNA
ggtgtcacactgaagtccttgttttagagctagaaatagcaagttaaaataaggctagtccgttatcaacttgaaaaagtggcaccgagtcggtgcctcactctgggcagtgtgagtgcaaaaaagaagctaaaggacttcag

SEQ ID NO: 4060 - RNA, 143 nt, synthetic construct
  source 1..143: mol_type = other RNA; note = pegRNA
ggtgtcacactgaagtccttgttttagagctagaaatagcaagttaaaataaggctagtccgttatcaacttgaaaaagtggcaccgagtcggtgcctctgggcagtgtgagtgcaaaaaagaagcaaaaggacttcagtgtg

SEQ ID NO: 4061 - RNA, 143 nt, synthetic construct
  source 1..143: mol_type = other RNA; note = pegRNA
ggtgtcacactgaagtccttgttttagagctagaaatagcaagttaaaataaggctagtccgttatcaacttgaaaaagtggcaccgagtcggtgcctctgggcagtgtgagtgcaaaaaagaagcaaaaggacttcagtttt

SEQ ID NO: 4062 - RNA, 143 nt, synthetic construct
  source 1..143: mol_type = other RNA; note = pegRNA
ggtgtcacactgaagtccttgttttagagctagaaatagcaagttaaaataaggctagtccgttatcaacttgaaaaagtggcaccgagtcggtgcctctgggcagtgtgagtgcaaaaaagaagcgaaaggacttcagtgtg

SEQ ID NO: 4063 - RNA, 143 nt, synthetic construct
  source 1..143: mol_type = other RNA; note = pegRNA
ggtgtcacactgaagtccttgttttagagctagaaatagcaagttaaaataaggctagtccgttatcaacttgaaaaagtggcaccgagtcggtgcctctgggcagtgtgagtgcaaaaaagaagcgaaaggacttcagtttt

SEQ ID NO: 4064 - RNA, 143 nt, synthetic construct
  source 1..143: mol_type = other RNA; note = pegRNA
ggtgtcacactgaagtccttgttttagagctagaaatagcaagttaaaataaggctagtccgttatcaacttgaaaaagtggcaccgagtcggtgcctctgggcagtgtgagtgcaaaaaagaagctaaaggacttcagtgtg

SEQ ID NO: 4065 - RNA, 143 nt, synthetic construct
  source 1..143: mol_type = other RNA; note = pegRNA
ggtgtcacactgaagtccttgttttagagctagaaatagcaagttaaaataaggctagtccgttatcaacttgaaaaagtggcaccgagtcggtgcctctgggcagtgtgagtgcaaaaaagaagctaaaggacttcagtttt

SEQ ID NO: 4066 - RNA, 143 nt, synthetic construct
  source 1..143: mol_type = other RNA; note = pegRNA
ggtgtcacactgaagtccttgttttagagctagaaatagcaagttaaaataaggctagtccgttatcaacttgaaaaagtggcaccgagtcggtgcctgggcagtgtgagtgcaaaaaagaagcaaaaggacttcagtgtgac

SEQ ID NO: 4067 - RNA, 143 nt, synthetic construct
  source 1..143: mol_type = other RNA; note = pegRNA
ggtgtcacactgaagtccttgttttagagctagaaatagcaagttaaaataaggctagtccgttatcaacttgaaaaagtggcaccgagtcggtgcctgggcagtgtgagtgcaaaaaagaagcaaaaggacttcagtgtttt

SEQ ID NO: 4068 - RNA, 143 nt, synthetic construct
  source 1..143: mol_type = other RNA; note = pegRNA
ggtgtcacactgaagtccttgttttagagctagaaatagcaagttaaaataaggctagtccgttatcaacttgaaaaagtggcaccgagtcggtgcctgggcagtgtgagtgcaaaaaagaagcgaaaggacttcagtgtgac

SEQ ID NO: 4069 - RNA, 143 nt, synthetic construct
  source 1..143: mol_type = other RNA; note = pegRNA
ggtgtcacactgaagtccttgttttagagctagaaatagcaagttaaaataaggctagtccgttatcaacttgaaaaagtggcaccgagtcggtgcctgggcagtgtgagtgcaaaaaagaagcgaaaggacttcagtgtttt

SEQ ID NO: 4070 - RNA, 143 nt, synthetic construct
  source 1..143: mol_type = other RNA; note = pegRNA
ggtgtcacactgaagtccttgttttagagctagaaatagcaagttaaaataaggctagtccgttatcaacttgaaaaagtggcaccgagtcggtgcctgggcagtgtgagtgcaaaaaagaagctaaaggacttcagtgtgac

SEQ ID NO: 4071 - RNA, 143 nt, synthetic construct
  source 1..143: mol_type = other RNA; note = pegRNA
ggtgtcacactgaagtccttgttttagagctagaaatagcaagttaaaataaggctagtccgttatcaacttgaaaaagtggcaccgagtcggtgcctgggcagtgtgagtgcaaaaaagaagctaaaggacttcagtgtttt

SEQ ID NO: 4072 - RNA, 143 nt, synthetic construct
  source 1..143: mol_type = other RNA; note = pegRNA
ggtgtcacactgaagtccttgttttagagctagaaatagcaagttaaaataaggctagtccgttatcaacttgaaaaagtggcaccgagtcggtgcgcagtgtgagtgcaaaaaagaagcaaaaggacttcagtgtgactttt

SEQ ID NO: 4073 - RNA, 143 nt, synthetic construct
  source 1..143: mol_type = other RNA; note = pegRNA
ggtgtcacactgaagtccttgttttagagctagaaatagcaagttaaaataaggctagtccgttatcaacttgaaaaagtggcaccgagtcggtgcgcagtgtgagtgcaaaaaagaagccaaaggacttcagtgtgactttt

SEQ ID NO: 4074 - RNA, 143 nt, synthetic construct
  source 1..143: mol_type = other RNA; note = pegRNA
ggtgtcacactgaagtccttgttttagagctagaaatagcaagttaaaataaggctagtccgttatcaacttgaaaaagtggcaccgagtcggtgcgcagtgtgagtgcaaaaaagaagcgaaaggacttcagtgtgactttt

SEQ ID NO: 4075 - RNA, 143 nt, synthetic construct
  source 1..143: mol_type = other RNA; note = pegRNA
ggtgtcacactgaagtccttgttttagagctagaaatagcaagttaaaataaggctagtccgttatcaacttgaaaaagtggcaccgagtcggtgcgcagtgtgagtgcaaaaaagaagctaaaggacttcagtgtgactttt

SEQ ID NO: 4076 - RNA, 143 nt, synthetic construct
  source 1..143: mol_type = other RNA; note = pegRNA
ggtgtcacactgaagtccttgttttagagctagaaatagcaagttaaaataaggctagtccgttatcaacttgaaaaagtggcaccgagtcggtgcggcagtgtgagtgcaaaaaagaagcaaaaggacttcagtgtgatttt

SEQ ID NO: 4077 - RNA, 143 nt, synthetic construct
  source 1..143: mol_type = other RNA; note = pegRNA
ggtgtcacactgaagtccttgttttagagctagaaatagcaagttaaaataaggctagtccgttatcaacttgaaaaagtggcaccgagtcggtgcggcagtgtgagtgcaaaaaagaagcgaaaggacttcagtgtgatttt

SEQ ID NO: 4078 - RNA, 143 nt, synthetic construct
  source 1..143: mol_type = other RNA; note = pegRNA
ggtgtcacactgaagtccttgttttagagctagaaatagcaagttaaaataaggctagtccgttatcaacttgaaaaagtggcaccgagtcggtgcggcagtgtgagtgcaaaaaagaagctaaaggacttcagtgtgatttt

SEQ ID NO: 4079 - RNA, 143 nt, synthetic construct
  source 1..143: mol_type = other RNA; note = pegRNA
ggtgtcacactgaagtccttgttttagagctagaaatagcaagttaaaataaggctagtccgttatcaacttgaaaaagtggcaccgagtcggtgcgggcagtgtgagtgcaaaaaagaagcaaaaggacttcagtgtgacac

SEQ ID NO: 4080 - RNA, 143 nt, synthetic construct
  source 1..143: mol_type = other RNA; note = pegRNA
ggtgtcacactgaagtccttgttttagagctagaaatagcaagttaaaataaggctagtccgttatcaacttgaaaaagtggcaccgagtcggtgcgggcagtgtgagtgcaaaaaagaagcaaaaggacttcagtgtgtttt

SEQ ID NO: 4081 - RNA, 143 nt, synthetic construct
  source 1..143: mol_type = other RNA; note = pegRNA
ggtgtcacactgaagtccttgttttagagctagaaatagcaagttaaaataaggctagtccgttatcaacttgaaaaagtggcaccgagtcggtgcgggcagtgtgagtgcaaaaaagaagcgaaaggacttcagtgtgacac

SEQ ID NO: 4082 - RNA, 143 nt, synthetic construct
  source 1..143: mol_type = other RNA; note = pegRNA
ggtgtcacactgaagtccttgttttagagctagaaatagcaagttaaaataaggctagtccgttatcaacttgaaaaagtggcaccgagtcggtgcgggcagtgtgagtgcaaaaaagaagcgaaaggacttcagtgtgtttt

SEQ ID NO: 4083 - RNA, 143 nt, synthetic construct
  source 1..143: mol_type = other RNA; note = pegRNA
ggtgtcacactgaagtccttgttttagagctagaaatagcaagttaaaataaggctagtccgttatcaacttgaaaaagtggcaccgagtcggtgcgggcagtgtgagtgcaaaaaagaagctaaaggacttcagtgtgacac

SEQ ID NO: 4084 - RNA, 143 nt, synthetic construct
  source 1..143: mol_type = other RNA; note = pegRNA
ggtgtcacactgaagtccttgttttagagctagaaatagcaagttaaaataaggctagtccgttatcaacttgaaaaagtggcaccgagtcggtgcgggcagtgtgagtgcaaaaaagaagctaaaggacttcagtgtgtttt

SEQ ID NO: 4085 - RNA, 143 nt, synthetic construct
  source 1..143: mol_type = other RNA; note = pegRNA
ggtgtcacactgaagtccttgttttagagctagaaatagcaagttaaaataaggctagtccgttatcaacttgaaaaagtggcaccgagtcggtgctcactctgggcagtgtgagtgcaaaaaagaagcaaaaggacttcagt

SEQ ID NO: 4086 - RNA, 143 nt, synthetic construct
  source 1..143: mol_type = other RNA; note = pegRNA
ggtgtcacactgaagtccttgttttagagctagaaatagcaagttaaaataaggctagtccgttatcaacttgaaaaagtggcaccgagtcggtgctcactctgggcagtgtgagtgcaaaaaagaagcgaaaggacttcagt

SEQ ID NO: 4087 - RNA, 143 nt, synthetic construct
  source 1..143: mol_type = other RNA; note = pegRNA
ggtgtcacactgaagtccttgttttagagctagaaatagcaagttaaaataaggctagtccgttatcaacttgaaaaagtggcaccgagtcggtgctcactctgggcagtgtgagtgcaaaaaagaagctaaaggacttcagt

SEQ ID NO: 4088 - RNA, 143 nt, synthetic construct
  source 1..143: mol_type = other RNA; note = pegRNA
ggtgtcacactgaagtccttgttttagagctagaaatagcaagttaaaataaggctagtccgttatcaacttgaaaaagtggcaccgagtcggtgctctgggcagtgtgagtgcaaaaaagaagcaaaaggacttcagtgtga

SEQ ID NO: 4089 - RNA, 143 nt, synthetic construct
  source 1..143: mol_type = other RNA; note = pegRNA
ggtgtcacactgaagtccttgttttagagctagaaatagcaagttaaaataaggctagtccgttatcaacttgaaaaagtggcaccgagtcggtgctctgggcagtgtgagtgcaaaaaagaagcaaaaggacttcagttttt

SEQ ID NO: 4090 - RNA, 143 nt, synthetic construct
  source 1..143: mol_type = other RNA; note = pegRNA
ggtgtcacactgaagtccttgttttagagctagaaatagcaagttaaaataaggctagtccgttatcaacttgaaaaagtggcaccgagtcggtgctctgggcagtgtgagtgcaaaaaagaagcgaaaggacttcagtgtga

SEQ ID NO: 4091 - RNA, 143 nt, synthetic construct
  source 1..143: mol_type = other RNA; note = pegRNA
ggtgtcacactgaagtccttgttttagagctagaaatagcaagttaaaataaggctagtccgttatcaacttgaaaaagtggcaccgagtcggtgctctgggcagtgtgagtgcaaaaaagaagcgaaaggacttcagttttt

SEQ ID NO: 4092 - RNA, 143 nt, synthetic construct
  source 1..143: mol_type = other RNA; note = pegRNA
ggtgtcacactgaagtccttgttttagagctagaaatagcaagttaaaataaggctagtccgttatcaacttgaaaaagtggcaccgagtcggtgctctgggcagtgtgagtgcaaaaaagaagctaaaggacttcagtgtga

SEQ ID NO: 4093 - RNA, 143 nt, synthetic construct
  source 1..143: mol_type = other RNA; note = pegRNA
ggtgtcacactgaagtccttgttttagagctagaaatagcaagttaaaataaggctagtccgttatcaacttgaaaaagtggcaccgagtcggtgctctgggcagtgtgagtgcaaaaaagaagctaaaggacttcagttttt

SEQ ID NO: 4094 - RNA, 143 nt, synthetic construct
  source 1..143: mol_type = other RNA; note = pegRNA
ggtgtcacactgaagtccttgttttagagctagaaatagcaagttaaaataaggctagtccgttatcaacttgaaaaagtggcaccgagtcggtgctgggcagtgtgagtgcaaaaaagaagcaaaaggacttcagtgtgaca

SEQ ID NO: 4095 - RNA, 143 nt, synthetic construct
  source 1..143: mol_type = other RNA; note = pegRNA
ggtgtcacactgaagtccttgttttagagctagaaatagcaagttaaaataaggctagtccgttatcaacttgaaaaagtggcaccgagtcggtgctgggcagtgtgagtgcaaaaaagaagcaaaaggacttcagtgttttt

SEQ ID NO: 4096 - RNA, 143 nt, synthetic construct
  source 1..143: mol_type = other RNA; note = pegRNA
ggtgtcacactgaagtccttgttttagagctagaaatagcaagttaaaataaggctagtccgttatcaacttgaaaaagtggcaccgagtcggtgctgggcagtgtgagtgcaaaaaagaagcgaaaggacttcagtgtgaca

SEQ ID NO: 4097 - RNA, 143 nt, synthetic construct
  source 1..143: mol_type = other RNA; note = pegRNA
ggtgtcacactgaagtccttgttttagagctagaaatagcaagttaaaataaggctagtccgttatcaacttgaaaaagtggcaccgagtcggtgctgggcagtgtgagtgcaaaaaagaagcgaaaggacttcagtgttttt

SEQ ID NO: 4098 - RNA, 143 nt, synthetic construct
  source 1..143: mol_type = other RNA; note = pegRNA
ggtgtcacactgaagtccttgttttagagctagaaatagcaagttaaaataaggctagtccgttatcaacttgaaaaagtggcaccgagtcggtgctgggcagtgtgagtgcaaaaaagaagctaaaggacttcagtgtgaca

SEQ ID NO: 4099 - RNA, 143 nt, synthetic construct
  source 1..143: mol_type = other RNA; note = pegRNA
ggtgtcacactgaagtccttgttttagagctagaaatagcaagttaaaataaggctagtccgttatcaacttgaaaaagtggcaccgagtcggtgctgggcagtgtgagtgcaaaaaagaagctaaaggacttcagtgttttt

SEQ ID NO: 4100 - RNA, 144 nt, synthetic construct
  source 1..144: mol_type = other RNA; note = pegRNA
ggtgtcacactgaagtccttgttttagagctagaaatagcaagttaaaataaggctagtccgttatcaacttgaaaaagtggcaccgagtcggtgcactctgggcagtgtgagtgcaaaaaagaagcaaaaggacttcagtgtg

SEQ ID NO: 4101 - RNA, 144 nt, synthetic construct
  source 1..144: mol_type = other RNA; note = pegRNA
ggtgtcacactgaagtccttgttttagagctagaaatagcaagttaaaataaggctagtccgttatcaacttgaaaaagtggcaccgagtcggtgcactctgggcagtgtgagtgcaaaaaagaagcaaaaggacttcagtttt

SEQ ID NO: 4102 - RNA, 144 nt, synthetic construct
  source 1..144: mol_type = other RNA; note = pegRNA
ggtgtcacactgaagtccttgttttagagctagaaatagcaagttaaaataaggctagtccgttatcaacttgaaaaagtggcaccgagtcggtgcactctgggcagtgtgagtgcaaaaaagaagcgaaaggacttcagtgtg

SEQ ID NO: 4103 - RNA, 144 nt, synthetic construct
  source 1..144: mol_type = other RNA; note = pegRNA
ggtgtcacactgaagtccttgttttagagctagaaatagcaagttaaaataaggctagtccgttatcaacttgaaaaagtggcaccgagtcggtgcactctgggcagtgtgagtgcaaaaaagaagcgaaaggacttcagtttt

SEQ ID NO: 4104 - RNA, 144 nt, synthetic construct
  source 1..144: mol_type = other RNA; note = pegRNA
ggtgtcacactgaagtccttgttttagagctagaaatagcaagttaaaataaggctagtccgttatcaacttgaaaaagtggcaccgagtcggtgcactctgggcagtgtgagtgcaaaaaagaagctaaaggacttcagtgtg

SEQ ID NO: 4105 - RNA, 144 nt, synthetic construct
  source 1..144: mol_type = other RNA; note = pegRNA
ggtgtcacactgaagtccttgttttagagctagaaatagcaagttaaaataaggctagtccgttatcaacttgaaaaagtggcaccgagtcggtgcactctgggcagtgtgagtgcaaaaaagaagctaaaggacttcagtttt

SEQ ID NO: 4106 - RNA, 144 nt, synthetic construct
  source 1..144: mol_type = other RNA; note = pegRNA
ggtgtcacactgaagtccttgttttagagctagaaatagcaagttaaaataaggctagtccgttatcaacttgaaaaagtggcaccgagtcggtgccactctgggcagtgtgagtgcaaaaaagaagcaaaaggacttcagtgt

SEQ ID NO: 4107 - RNA, 144 nt, synthetic construct
  source 1..144: mol_type = other RNA; note = pegRNA
ggtgtcacactgaagtccttgttttagagctagaaatagcaagttaaaataaggctagtccgttatcaacttgaaaaagtggcaccgagtcggtgccactctgggcagtgtgagtgcaaaaaagaagcgaaaggacttcagtgt

SEQ ID NO: 4108 - RNA, 144 nt, synthetic construct
  source 1..144: mol_type = other RNA; note = pegRNA
ggtgtcacactgaagtccttgttttagagctagaaatagcaagttaaaataaggctagtccgttatcaacttgaaaaagtggcaccgagtcggtgccactctgggcagtgtgagtgcaaaaaagaagctaaaggacttcagtgt

SEQ ID NO: 4109 - RNA, 144 nt, synthetic construct
  source 1..144: mol_type = other RNA; note = pegRNA
ggtgtcacactgaagtccttgttttagagctagaaatagcaagttaaaataaggctagtccgttatcaacttgaaaaagtggcaccgagtcggtgccagtgtgagtgcaaaaaagaagcaaaaggacttcagtgtgacactttt

SEQ ID NO: 4110 - RNA, 144 nt, synthetic construct
  source 1..144: mol_type = other RNA; note = pegRNA
ggtgtcacactgaagtccttgttttagagctagaaatagcaagttaaaataaggctagtccgttatcaacttgaaaaagtggcaccgagtcggtgccagtgtgagtgcaaaaaagaagcgaaaggacttcagtgtgacactttt

SEQ ID NO: 4111 - RNA, 144 nt, synthetic construct
  source 1..144: mol_type = other RNA; note = pegRNA
ggtgtcacactgaagtccttgttttagagctagaaatagcaagttaaaataaggctagtccgttatcaacttgaaaaagtggcaccgagtcggtgccagtgtgagtgcaaaaaagaagctaaaggacttcagtgtgacactttt

SEQ ID NO: 4112 - RNA, 144 nt, synthetic construct
  source 1..144: mol_type = other RNA; note = pegRNA
ggtgtcacactgaagtccttgttttagagctagaaatagcaagttaaaataaggctagtccgttatcaacttgaaaaagtggcaccgagtcggtgccctcactctgggcagtgtgagtgcaaaaaagaagcaaaaggacttcag

SEQ ID NO: 4113 - RNA, 144 nt, synthetic construct
  source 1..144: mol_type = other RNA; note = pegRNA
ggtgtcacactgaagtccttgttttagagctagaaatagcaagttaaaataaggctagtccgttatcaacttgaaaaagtggcaccgagtcggtgccctcactctgggcagtgtgagtgcaaaaaagaagcgaaaggacttcag

SEQ ID NO: 4114 - RNA, 144 nt, synthetic construct
  source 1..144: mol_type = other RNA; note = pegRNA
ggtgtcacactgaagtccttgttttagagctagaaatagcaagttaaaataaggctagtccgttatcaacttgaaaaagtggcaccgagtcggtgccctcactctgggcagtgtgagtgcaaaaaagaagctaaaggacttcag

SEQ ID NO: 4115 - RNA, 144 nt, synthetic construct
  source 1..144: mol_type = other RNA; note = pegRNA
ggtgtcacactgaagtccttgttttagagctagaaatagcaagttaaaataaggctagtccgttatcaacttgaaaaagtggcaccgagtcggtgcctcactctgggcagtgtgagtgcaaaaaagaagcaaaaggacttcagt

SEQ ID NO: 4116 - RNA, 144 nt, synthetic construct
  source 1..144: mol_type = other RNA; note = pegRNA
ggtgtcacactgaagtccttgttttagagctagaaatagcaagttaaaataaggctagtccgttatcaacttgaaaaagtggcaccgagtcggtgcctcactctgggcagtgtgagtgcaaaaaagaagcgaaaggacttcagt

SEQ ID NO: 4117 - RNA, 144 nt, synthetic construct
  source 1..144: mol_type = other RNA; note = pegRNA
ggtgtcacactgaagtccttgttttagagctagaaatagcaagttaaaataaggctagtccgttatcaacttgaaaaagtggcaccgagtcggtgcctcactctgggcagtgtgagtgcaaaaaagaagctaaaggacttcagt

SEQ ID NO: 4118 - RNA, 144 nt, synthetic construct
  source 1..144: mol_type = other RNA; note = pegRNA
ggtgtcacactgaagtccttgttttagagctagaaatagcaagttaaaataaggctagtccgttatcaacttgaaaaagtggcaccgagtcggtgcctctgggcagtgtgagtgcaaaaaagaagcaaaaggacttcagtgtga

SEQ ID NO: 4119 - RNA, 144 nt, synthetic construct
  source 1..144: mol_type = other RNA; note = pegRNA
ggtgtcacactgaagtccttgttttagagctagaaatagcaagttaaaataaggctagtccgttatcaacttgaaaaagtggcaccgagtcggtgcctctgggcagtgtgagtgcaaaaaagaagcaaaaggacttcagttttt

SEQ ID NO: 4120 - RNA, 144 nt, synthetic construct
  source 1..144: mol_type = other RNA; note = pegRNA
ggtgtcacactgaagtccttgttttagagctagaaatagcaagttaaaataaggctagtccgttatcaacttgaaaaagtggcaccgagtcggtgcctctgggcagtgtgagtgcaaaaaagaagcgaaaggacttcagtgtga

SEQ ID NO: 4121 - RNA, 144 nt, synthetic construct
  source 1..144: mol_type = other RNA; note = pegRNA
ggtgtcacactgaagtccttgttttagagctagaaatagcaagttaaaataaggctagtccgttatcaacttgaaaaagtggcaccgagtcggtgcctctgggcagtgtgagtgcaaaaaagaagcgaaaggacttcagttttt

SEQ ID NO: 4122 - RNA, 144 nt, synthetic construct
  source 1..144: mol_type = other RNA; note = pegRNA
ggtgtcacactgaagtccttgttttagagctagaaatagcaagttaaaataaggctagtccgttatcaacttgaaaaagtggcaccgagtcggtgcctctgggcagtgtgagtgcaaaaaagaagctaaaggacttcagtgtga

SEQ ID NO: 4123 - RNA, 144 nt, synthetic construct
  source 1..144: mol_type = other RNA; note = pegRNA
ggtgtcacactgaagtccttgttttagagctagaaatagcaagttaaaataaggctagtccgttatcaacttgaaaaagtggcaccgagtcggtgcctctgggcagtgtgagtgcaaaaaagaagctaaaggacttcagttttt

SEQ ID NO: 4124 - RNA, 144 nt, synthetic construct
  source 1..144: mol_type = other RNA; note = pegRNA
ggtgtcacactgaagtccttgttttagagctagaaatagcaagttaaaataaggctagtccgttatcaacttgaaaaagtggcaccgagtcggtgcctgggcagtgtgagtgcaaaaaagaagcaaaaggacttcagtgtgaca

SEQ ID NO: 4125 - RNA, 144 nt, synthetic construct
  source 1..144: mol_type = other RNA; note = pegRNA
ggtgtcacactgaagtccttgttttagagctagaaatagcaagttaaaataaggctagtccgttatcaacttgaaaaagtggcaccgagtcggtgcctgggcagtgtgagtgcaaaaaagaagcaaaaggacttcagtgttttt

SEQ ID NO: 4126 - RNA, 144 nt, synthetic construct
  source 1..144: mol_type = other RNA; note = pegRNA
ggtgtcacactgaagtccttgttttagagctagaaatagcaagttaaaataaggctagtccgttatcaacttgaaaaagtggcaccgagtcggtgcctgggcagtgtgagtgcaaaaaagaagcgaaaggacttcagtgtgaca

SEQ ID NO: 4127 - RNA, 144 nt, synthetic construct
  source 1..144: mol_type = other RNA; note = pegRNA
ggtgtcacactgaagtccttgttttagagctagaaatagcaagttaaaataaggctagtccgttatcaacttgaaaaagtggcaccgagtcggtgcctgggcagtgtgagtgcaaaaaagaagcgaaaggacttcagtgttttt

SEQ ID NO: 4128 - RNA, 144 nt, synthetic construct
  source 1..144: mol_type = other RNA; note = pegRNA
ggtgtcacactgaagtccttgttttagagctagaaatagcaagttaaaataaggctagtccgttatcaacttgaaaaagtggcaccgagtcggtgcctgggcagtgtgagtgcaaaaaagaagctaaaggacttcagtgtgaca

SEQ ID NO: 4129 - RNA, 144 nt, synthetic construct
  source 1..144: mol_type = other RNA; note = pegRNA
ggtgtcacactgaagtccttgttttagagctagaaatagcaagttaaaataaggctagtccgttatcaacttgaaaaagtggcaccgagtcggtgcctgggcagtgtgagtgcaaaaaagaagctaaaggacttcagtgttttt

SEQ ID NO: 4130 - RNA, 144 nt, synthetic construct
  source 1..144: mol_type = other RNA; note = pegRNA
ggtgtcacactgaagtccttgttttagagctagaaatagcaagttaaaataaggctagtccgttatcaacttgaaaaagtggcaccgagtcggtgcgcagtgtgagtgcaaaaaagaagcaaaaggacttcagtgtgacatttt

SEQ ID NO: 4131 - RNA, 144 nt, synthetic construct
  source 1..144: mol_type = other RNA; note = pegRNA
ggtgtcacactgaagtccttgttttagagctagaaatagcaagttaaaataaggctagtccgttatcaacttgaaaaagtggcaccgagtcggtgcgcagtgtgagtgcaaaaaagaagcgaaaggacttcagtgtgacatttt

SEQ ID NO: 4132 - RNA, 144 nt, synthetic construct
  source 1..144: mol_type = other RNA; note = pegRNA
ggtgtcacactgaagtccttgttttagagctagaaatagcaagttaaaataaggctagtccgttatcaacttgaaaaagtggcaccgagtcggtgcgcagtgtgagtgcaaaaaagaagctaaaggacttcagtgtgacatttt

SEQ ID NO: 4133 - RNA, 144 nt, synthetic construct
  source 1..144: mol_type = other RNA; note = pegRNA
ggtgtcacactgaagtccttgttttagagctagaaatagcaagttaaaataaggctagtccgttatcaacttgaaaaagtggcaccgagtcggtgcggcagtgtgagtgcaaaaaagaagcaaaaggacttcagtgtgactttt

SEQ ID NO: 4134 - RNA, 144 nt, synthetic construct
  source 1..144: mol_type = other RNA; note = pegRNA
ggtgtcacactgaagtccttgttttagagctagaaatagcaagttaaaataaggctagtccgttatcaacttgaaaaagtggcaccgagtcggtgcggcagtgtgagtgcaaaaaagaagccaaaggacttcagtgtgactttt

SEQ ID NO: 4135 - RNA, 144 nt, synthetic construct
  source 1..144: mol_type = other RNA; note = pegRNA
ggtgtcacactgaagtccttgttttagagctagaaatagcaagttaaaataaggctagtccgttatcaacttgaaaaagtggcaccgagtcggtgcggcagtgtgagtgcaaaaaagaagcgaaaggacttcagtgtgactttt

SEQ ID NO: 4136 - RNA, 144 nt, synthetic construct
  source 1..144: mol_type = other RNA; note = pegRNA
ggtgtcacactgaagtccttgttttagagctagaaatagcaagttaaaataaggctagtccgttatcaacttgaaaaagtggcaccgagtcggtgcggcagtgtgagtgcaaaaaagaagctaaaggacttcagtgtgactttt

SEQ ID NO: 4137 - RNA, 144 nt, synthetic construct
  source 1..144: mol_type = other RNA; note = pegRNA
ggtgtcacactgaagtccttgttttagagctagaaatagcaagttaaaataaggctagtccgttatcaacttgaaaaagtggcaccgagtcggtgcgggcagtgtgagtgcaaaaaagaagcaaaaggacttcagtgtgatttt

SEQ ID NO: 4138 - RNA, 144 nt, synthetic construct
  source 1..144: mol_type = other RNA; note = pegRNA
ggtgtcacactgaagtccttgttttagagctagaaatagcaagttaaaataaggctagtccgttatcaacttgaaaaagtggcaccgagtcggtgcgggcagtgtgagtgcaaaaaagaagcgaaaggacttcagtgtgatttt

SEQ ID NO: 4139 - RNA, 144 nt, synthetic construct
  source 1..144: mol_type = other RNA; note = pegRNA
ggtgtcacactgaagtccttgttttagagctagaaatagcaagttaaaataaggctagtccgttatcaacttgaaaaagtggcaccgagtcggtgcgggcagtgtgagtgcaaaaaagaagctaaaggacttcagtgtgatttt

SEQ ID NO: 4140 - RNA, 144 nt, synthetic construct
  source 1..144: mol_type = other RNA; note = pegRNA
ggtgtcacactgaagtccttgttttagagctagaaatagcaagttaaaataaggctagtccgttatcaacttgaaaaagtggcaccgagtcggtgctcactctgggcagtgtgagtgcaaaaaagaagcaaaaggacttcagtg

SEQ ID NO: 4141 - RNA, 144 nt, synthetic construct
  source 1..144: mol_type = other RNA; note = pegRNA
ggtgtcacactgaagtccttgttttagagctagaaatagcaagttaaaataaggctagtccgttatcaacttgaaaaagtggcaccgagtcggtgctcactctgggcagtgtgagtgcaaaaaagaagcgaaaggacttcagtg

SEQ ID NO: 4142 - RNA, 144 nt, synthetic construct
  source 1..144: mol_type = other RNA; note = pegRNA
ggtgtcacactgaagtccttgttttagagctagaaatagcaagttaaaataaggctagtccgttatcaacttgaaaaagtggcaccgagtcggtgctcactctgggcagtgtgagtgcaaaaaagaagctaaaggacttcagtg

SEQ ID NO: 4143 - RNA, 144 nt, synthetic construct
  source 1..144: mol_type = other RNA; note = pegRNA
ggtgtcacactgaagtccttgttttagagctagaaatagcaagttaaaataaggctagtccgttatcaacttgaaaaagtggcaccgagtcggtgctctgggcagtgtgagtgcaaaaaagaagcaaaaggacttcagtgtgac

SEQ ID NO: 4144 - RNA, 144 nt, synthetic construct
  source 1..144: mol_type = other RNA; note = pegRNA
ggtgtcacactgaagtccttgttttagagctagaaatagcaagttaaaataaggctagtccgttatcaacttgaaaaagtggcaccgagtcggtgctctgggcagtgtgagtgcaaaaaagaagcaaaaggacttcagtgtttt

SEQ ID NO: 4145 - RNA, 144 nt, synthetic construct
  source 1..144: mol_type = other RNA; note = pegRNA
ggtgtcacactgaagtccttgttttagagctagaaatagcaagttaaaataaggctagtccgttatcaacttgaaaaagtggcaccgagtcggtgctctgggcagtgtgagtgcaaaaaagaagcgaaaggacttcagtgtgac

SEQ ID NO: 4146 - RNA, 144 nt, synthetic construct
  source 1..144: mol_type = other RNA; note = pegRNA
ggtgtcacactgaagtccttgttttagagctagaaatagcaagttaaaataaggctagtccgttatcaacttgaaaaagtggcaccgagtcggtgctctgggcagtgtgagtgcaaaaaagaagcgaaaggacttcagtgtttt

SEQ ID NO: 4147 - RNA, 144 nt, synthetic construct
  source 1..144: mol_type = other RNA; note = pegRNA
ggtgtcacactgaagtccttgttttagagctagaaatagcaagttaaaataaggctagtccgttatcaacttgaaaaagtggcaccgagtcggtgctctgggcagtgtgagtgcaaaaaagaagctaaaggacttcagtgtgac

SEQ ID NO: 4148 - RNA, 144 nt, synthetic construct
  source 1..144: mol_type = other RNA; note = pegRNA
ggtgtcacactgaagtccttgttttagagctagaaatagcaagttaaaataaggctagtccgttatcaacttgaaaaagtggcaccgagtcggtgctctgggcagtgtgagtgcaaaaaagaagctaaaggacttcagtgtttt

SEQ ID NO: 4149 - RNA, 144 nt, synthetic construct
  source 1..144: mol_type = other RNA; note = pegRNA
ggtgtcacactgaagtccttgttttagagctagaaatagcaagttaaaataaggctagtccgttatcaacttgaaaaagtggcaccgagtcggtgctgggcagtgtgagtgcaaaaaagaagcaaaaggacttcagtgtgacac

SEQ ID NO: 4150 - RNA, 144 nt, synthetic construct
  source 1..144: mol_type = other RNA; note = pegRNA
ggtgtcacactgaagtccttgttttagagctagaaatagcaagttaaaataaggctagtccgttatcaacttgaaaaagtggcaccgagtcggtgctgggcagtgtgagtgcaaaaaagaagcaaaaggacttcagtgtgtttt

SEQ ID NO: 4151 - RNA, 144 nt, synthetic construct
  source 1..144: mol_type = other RNA; note = pegRNA
ggtgtcacactgaagtccttgttttagagctagaaatagcaagttaaaataaggctagtccgttatcaacttgaaaaagtggcaccgagtcggtgctgggcagtgtgagtgcaaaaaagaagccaaaggacttcagtgtgtttt

SEQ ID NO: 4152 - RNA, 144 nt, synthetic construct
  source 1..144: mol_type = other RNA; note = pegRNA
ggtgtcacactgaagtccttgttttagagctagaaatagcaagttaaaataaggctagtccgttatcaacttgaaaaagtggcaccgagtcggtgctgggcagtgtgagtgcaaaaaagaagcgaaaggacttcagtgtgacac

SEQ ID NO: 4153 - RNA, 144 nt, synthetic construct
  source 1..144: mol_type = other RNA; note = pegRNA
ggtgtcacactgaagtccttgttttagagctagaaatagcaagttaaaataaggctagtccgttatcaacttgaaaaagtggcaccgagtcggtgctgggcagtgtgagtgcaaaaaagaagcgaaaggacttcagtgtgtttt

SEQ ID NO: 4154 - RNA, 144 nt, synthetic construct
  source 1..144: mol_type = other RNA; note = pegRNA
ggtgtcacactgaagtccttgttttagagctagaaatagcaagttaaaataaggctagtccgttatcaacttgaaaaagtggcaccgagtcggtgctgggcagtgtgagtgcaaaaaagaagctaaaggacttcagtgtgacac

SEQ ID NO: 4155 - RNA, 144 nt, synthetic construct
  source 1..144: mol_type = other RNA; note = pegRNA
ggtgtcacactgaagtccttgttttagagctagaaatagcaagttaaaataaggctagtccgttatcaacttgaaaaagtggcaccgagtcggtgctgggcagtgtgagtgcaaaaaagaagctaaaggacttcagtgtgtttt

SEQ ID NO: 4156 - RNA, 145 nt, synthetic construct
  source 1..145: mol_type = other RNA; note = pegRNA
ggtgtcacactgaagtccttgttttagagctagaaatagcaagttaaaataaggctagtccgttatcaacttgaaaaagtggcaccgagtcggtgcactctgggcagtgtgagtgcaaaaaagaagcaaaaggacttcagtgtga

SEQ ID NO: 4157 - RNA, 145 nt, synthetic construct
  source 1..145: mol_type = other RNA; note = pegRNA
ggtgtcacactgaagtccttgttttagagctagaaatagcaagttaaaataaggctagtccgttatcaacttgaaaaagtggcaccgagtcggtgcactctgggcagtgtgagtgcaaaaaagaagcaaaaggacttcagttttt

SEQ ID NO: 4158 - RNA, 145 nt, synthetic construct
  source 1..145: mol_type = other RNA; note = pegRNA
ggtgtcacactgaagtccttgttttagagctagaaatagcaagttaaaataaggctagtccgttatcaacttgaaaaagtggcaccgagtcggtgcactctgggcagtgtgagtgcaaaaaagaagcgaaaggacttcagtgtga

SEQ ID NO: 4159 - RNA, 145 nt, synthetic construct
  source 1..145: mol_type = other RNA; note = pegRNA
ggtgtcacactgaagtccttgttttagagctagaaatagcaagttaaaataaggctagtccgttatcaacttgaaaaagtggcaccgagtcggtgcactctgggcagtgtgagtgcaaaaaagaagcgaaaggacttcagttttt

SEQ ID NO: 4160 - RNA, 145 nt, synthetic construct
  source 1..145: mol_type = other RNA; note = pegRNA
ggtgtcacactgaagtccttgttttagagctagaaatagcaagttaaaataaggctagtccgttatcaacttgaaaaagtggcaccgagtcggtgcactctgggcagtgtgagtgcaaaaaagaagctaaaggacttcagtgtga

SEQ ID NO: 4161 - RNA, 145 nt, synthetic construct
  source 1..145: mol_type = other RNA; note = pegRNA
ggtgtcacactgaagtccttgttttagagctagaaatagcaagttaaaataaggctagtccgttatcaacttgaaaaagtggcaccgagtcggtgcactctgggcagtgtgagtgcaaaaaagaagctaaaggacttcagttttt

SEQ ID NO: 4162 - RNA, 145 nt, synthetic construct
  source 1..145: mol_type = other RNA; note = pegRNA
ggtgtcacactgaagtccttgttttagagctagaaatagcaagttaaaataaggctagtccgttatcaacttgaaaaagtggcaccgagtcggtgccactctgggcagtgtgagtgcaaaaaagaagcaaaaggacttcagtgtg

SEQ ID NO: 4163 - RNA, 145 nt, synthetic construct
  source 1..145: mol_type = other RNA; note = pegRNA
ggtgtcacactgaagtccttgttttagagctagaaatagcaagttaaaataaggctagtccgttatcaacttgaaaaagtggcaccgagtcggtgccactctgggcagtgtgagtgcaaaaaagaagcaaaaggacttcagtttt

SEQ ID NO: 4164 - RNA, 145 nt, synthetic construct
  source 1..145: mol_type = other RNA; note = pegRNA
ggtgtcacactgaagtccttgttttagagctagaaatagcaagttaaaataaggctagtccgttatcaacttgaaaaagtggcaccgagtcggtgccactctgggcagtgtgagtgcaaaaaagaagcgaaaggacttcagtgtg

SEQ ID NO: 4165 - RNA, 145 nt, synthetic construct
  source 1..145: mol_type = other RNA; note = pegRNA
ggtgtcacactgaagtccttgttttagagctagaaatagcaagttaaaataaggctagtccgttatcaacttgaaaaagtggcaccgagtcggtgccactctgggcagtgtgagtgcaaaaaagaagcgaaaggacttcagtttt

SEQ ID NO: 4166 - RNA, 145 nt, synthetic construct
  source 1..145: mol_type = other RNA; note = pegRNA
ggtgtcacactgaagtccttgttttagagctagaaatagcaagttaaaataaggctagtccgttatcaacttgaaaaagtggcaccgagtcggtgccactctgggcagtgtgagtgcaaaaaagaagctaaaggacttcagtgtg

SEQ ID NO: 4167 - RNA, 145 nt, synthetic construct
  source 1..145: mol_type = other RNA; note = pegRNA
ggtgtcacactgaagtccttgttttagagctagaaatagcaagttaaaataaggctagtccgttatcaacttgaaaaagtggcaccgagtcggtgccactctgggcagtgtgagtgcaaaaaagaagctaaaggacttcagtttt

SEQ ID NO: 4168 - RNA, 145 nt, synthetic construct
  source 1..145: mol_type = other RNA; note = pegRNA
ggtgtcacactgaagtccttgttttagagctagaaatagcaagttaaaataaggctagtccgttatcaacttgaaaaagtggcaccgagtcggtgccctcactctgggcagtgtgagtgcaaaaaagaagcaaaaggacttcagt

SEQ ID NO: 4169 - RNA, 145 nt, synthetic construct
  source 1..145: mol_type = other RNA; note = pegRNA
ggtgtcacactgaagtccttgttttagagctagaaatagcaagttaaaataaggctagtccgttatcaacttgaaaaagtggcaccgagtcggtgccctcactctgggcagtgtgagtgcaaaaaagaagcgaaaggacttcagt

SEQ ID NO: 4170 - RNA, 145 nt, synthetic construct
  source 1..145: mol_type = other RNA; note = pegRNA
ggtgtcacactgaagtccttgttttagagctagaaatagcaagttaaaataaggctagtccgttatcaacttgaaaaagtggcaccgagtcggtgccctcactctgggcagtgtgagtgcaaaaaagaagctaaaggacttcagt

SEQ ID NO: 4171 - RNA, 145 nt, synthetic construct
  source 1..145: mol_type = other RNA; note = pegRNA
ggtgtcacactgaagtccttgttttagagctagaaatagcaagttaaaataaggctagtccgttatcaacttgaaaaagtggcaccgagtcggtgcctcactctgggcagtgtgagtgcaaaaaagaagcaaaaggacttcagtg

SEQ ID NO: 4172 - RNA, 145 nt, synthetic construct
  source 1..145: mol_type = other RNA; note = pegRNA
ggtgtcacactgaagtccttgttttagagctagaaatagcaagttaaaataaggctagtccgttatcaacttgaaaaagtggcaccgagtcggtgcctcactctgggcagtgtgagtgcaaaaaagaagcgaaaggacttcagtg

SEQ ID NO: 4173 - RNA, 145 nt, synthetic construct
  source 1..145: mol_type = other RNA; note = pegRNA
ggtgtcacactgaagtccttgttttagagctagaaatagcaagttaaaataaggctagtccgttatcaacttgaaaaagtggcaccgagtcggtgcctcactctgggcagtgtgagtgcaaaaaagaagctaaaggacttcagtg

SEQ ID NO: 4174 - RNA, 145 nt, synthetic construct
  source 1..145: mol_type = other RNA; note = pegRNA
ggtgtcacactgaagtccttgttttagagctagaaatagcaagttaaaataaggctagtccgttatcaacttgaaaaagtggcaccgagtcggtgcctctgggcagtgtgagtgcaaaaaagaagcaaaaggacttcagtgtgac

SEQ ID NO: 4175 - RNA, 145 nt, synthetic construct
  source 1..145: mol_type = other RNA; note = pegRNA
ggtgtcacactgaagtccttgttttagagctagaaatagcaagttaaaataaggctagtccgttatcaacttgaaaaagtggcaccgagtcggtgcctctgggcagtgtgagtgcaaaaaagaagcaaaaggacttcagtgtttt

SEQ ID NO: 4176 - RNA, 145 nt, synthetic construct
  source 1..145: mol_type = other RNA; note = pegRNA
ggtgtcacactgaagtccttgttttagagctagaaatagcaagttaaaataaggctagtccgttatcaacttgaaaaagtggcaccgagtcggtgcctctgggcagtgtgagtgcaaaaaagaagcgaaaggacttcagtgtgac

SEQ ID NO: 4177 - RNA, 145 nt, synthetic construct
  source 1..145: mol_type = other RNA; note = pegRNA
ggtgtcacactgaagtccttgttttagagctagaaatagcaagttaaaataaggctagtccgttatcaacttgaaaaagtggcaccgagtcggtgcctctgggcagtgtgagtgcaaaaaagaagcgaaaggacttcagtgtttt

SEQ ID NO: 4178 - RNA, 145 nt, synthetic construct
  source 1..145: mol_type = other RNA; note = pegRNA
ggtgtcacactgaagtccttgttttagagctagaaatagcaagttaaaataaggctagtccgttatcaacttgaaaaagtggcaccgagtcggtgcctctgggcagtgtgagtgcaaaaaagaagctaaaggacttcagtgtgac

SEQ ID NO: 4179 - RNA, 145 nt, synthetic construct
  source 1..145: mol_type = other RNA; note = pegRNA
ggtgtcacactgaagtccttgttttagagctagaaatagcaagttaaaataaggctagtccgttatcaacttgaaaaagtggcaccgagtcggtgcctctgggcagtgtgagtgcaaaaaagaagctaaaggacttcagtgtttt

SEQ ID NO: 4180 - RNA, 145 nt, synthetic construct
  source 1..145: mol_type = other RNA; note = pegRNA
ggtgtcacactgaagtccttgttttagagctagaaatagcaagttaaaataaggctagtccgttatcaacttgaaaaagtggcaccgagtcggtgcctgggcagtgtgagtgcaaaaaagaagcaaaaggacttcagtgtgacac

SEQ ID NO: 4181 - RNA, 145 nt, synthetic construct
  source 1..145: mol_type = other RNA; note = pegRNA
ggtgtcacactgaagtccttgttttagagctagaaatagcaagttaaaataaggctagtccgttatcaacttgaaaaagtggcaccgagtcggtgcctgggcagtgtgagtgcaaaaaagaagcaaaaggacttcagtgtgtttt

SEQ ID NO: 4182 - RNA, 145 nt, synthetic construct
  source 1..145: mol_type = other RNA; note = pegRNA
ggtgtcacactgaagtccttgttttagagctagaaatagcaagttaaaataaggctagtccgttatcaacttgaaaaagtggcaccgagtcggtgcctgggcagtgtgagtgcaaaaaagaagcgaaaggacttcagtgtgacac

SEQ ID NO: 4183 - RNA, 145 nt, synthetic construct
  source 1..145: mol_type = other RNA; note = pegRNA
ggtgtcacactgaagtccttgttttagagctagaaatagcaagttaaaataaggctagtccgttatcaacttgaaaaagtggcaccgagtcggtgcctgggcagtgtgagtgcaaaaaagaagcgaaaggacttcagtgtgtttt

SEQ ID NO: 4184 - RNA, 145 nt, synthetic construct
  source 1..145: mol_type = other RNA; note = pegRNA
ggtgtcacactgaagtccttgttttagagctagaaatagcaagttaaaataaggctagtccgttatcaacttgaaaaagtggcaccgagtcggtgcctgggcagtgtgagtgcaaaaaagaagctaaaggacttcagtgtgacac

SEQ ID NO: 4185 - RNA, 145 nt, synthetic construct
  source 1..145: mol_type = other RNA; note = pegRNA
ggtgtcacactgaagtccttgttttagagctagaaatagcaagttaaaataaggctagtccgttatcaacttgaaaaagtggcaccgagtcggtgcctgggcagtgtgagtgcaaaaaagaagctaaaggacttcagtgtgtttt

SEQ ID NO: 4186 - RNA, 145 nt, synthetic construct
  source 1..145: mol_type = other RNA; note = pegRNA
ggtgtcacactgaagtccttgttttagagctagaaatagcaagttaaaataaggctagtccgttatcaacttgaaaaagtggcaccgagtcggtgcgcagtgtgagtgcaaaaaagaagcaaaaggacttcagtgtgacactttt

SEQ ID NO: 4187 - RNA, 145 nt, synthetic construct
  source 1..145: mol_type = other RNA; note = pegRNA
ggtgtcacactgaagtccttgttttagagctagaaatagcaagttaaaataaggctagtccgttatcaacttgaaaaagtggcaccgagtcggtgcgcagtgtgagtgcaaaaaagaagcgaaaggacttcagtgtgacactttt

SEQ ID NO: 4188 - RNA, 145 nt, synthetic construct
  source 1..145: mol_type = other RNA; note = pegRNA
ggtgtcacactgaagtccttgttttagagctagaaatagcaagttaaaataaggctagtccgttatcaacttgaaaaagtggcaccgagtcggtgcgcagtgtgagtgcaaaaaagaagctaaaggacttcagtgtgacactttt

SEQ ID NO: 4189 - RNA, 145 nt, synthetic construct
  source 1..145: mol_type = other RNA; note = pegRNA
ggtgtcacactgaagtccttgttttagagctagaaatagcaagttaaaataaggctagtccgttatcaacttgaaaaagtggcaccgagtcggtgcggcagtgtgagtgcaaaaaagaagcaaaaggacttcagtgtgacatttt

SEQ ID NO: 4190 - RNA, 145 nt, synthetic construct
  source 1..145: mol_type = other RNA; note = pegRNA
ggtgtcacactgaagtccttgttttagagctagaaatagcaagttaaaataaggctagtccgttatcaacttgaaaaagtggcaccgagtcggtgcggcagtgtgagtgcaaaaaagaagcgaaaggacttcagtgtgacatttt

SEQ ID NO: 4191 - RNA, 145 nt, synthetic construct
  source 1..145: mol_type = other RNA; note = pegRNA
ggtgtcacactgaagtccttgttttagagctagaaatagcaagttaaaataaggctagtccgttatcaacttgaaaaagtggcaccgagtcggtgcggcagtgtgagtgcaaaaaagaagctaaaggacttcagtgtgacatttt

SEQ ID NO: 4192 - RNA, 145 nt, synthetic construct
  source 1..145: mol_type = other RNA; note = pegRNA
ggtgtcacactgaagtccttgttttagagctagaaatagcaagttaaaataaggctagtccgttatcaacttgaaaaagtggcaccgagtcggtgcgggcagtgtgagtgcaaaaaagaagcaaaaggacttcagtgtgactttt

SEQ ID NO: 4193 - RNA, 145 nt, synthetic construct
  source 1..145: mol_type = other RNA; note = pegRNA
ggtgtcacactgaagtccttgttttagagctagaaatagcaagttaaaataaggctagtccgttatcaacttgaaaaagtggcaccgagtcggtgcgggcagtgtgagtgcaaaaaagaagcgaaaggacttcagtgtgactttt

SEQ ID NO: 4194 - RNA, 145 nt, synthetic construct
  source 1..145: mol_type = other RNA; note = pegRNA
ggtgtcacactgaagtccttgttttagagctagaaatagcaagttaaaataaggctagtccgttatcaacttgaaaaagtggcaccgagtcggtgcgggcagtgtgagtgcaaaaaagaagctaaaggacttcagtgtgactttt

SEQ ID NO: 4195 - RNA, 145 nt, synthetic construct
  source 1..145: mol_type = other RNA; note = pegRNA
ggtgtcacactgaagtccttgttttagagctagaaatagcaagttaaaataaggctagtccgttatcaacttgaaaaagtggcaccgagtcggtgctcactctgggcagtgtgagtgcaaaaaagaagcaaaaggacttcagtgt

SEQ ID NO: 4196 - RNA, 145 nt, synthetic construct
  source 1..145: mol_type = other RNA; note = pegRNA
ggtgtcacactgaagtccttgttttagagctagaaatagcaagttaaaataaggctagtccgttatcaacttgaaaaagtggcaccgagtcggtgctcactctgggcagtgtgagtgcaaaaaagaagcgaaaggacttcagtgt

SEQ ID NO: 4197 - RNA, 145 nt, synthetic construct
  source 1..145: mol_type = other RNA; note = pegRNA
ggtgtcacactgaagtccttgttttagagctagaaatagcaagttaaaataaggctagtccgttatcaacttgaaaaagtggcaccgagtcggtgctcactctgggcagtgtgagtgcaaaaaagaagctaaaggacttcagtgt

SEQ ID NO: 4198 - RNA, 145 nt, synthetic construct
  source 1..145: mol_type = other RNA; note = pegRNA
ggtgtcacactgaagtccttgttttagagctagaaatagcaagttaaaataaggctagtccgttatcaacttgaaaaagtggcaccgagtcggtgctctgggcagtgtgagtgcaaaaaagaagcaaaaggacttcagtgtgaca

SEQ ID NO: 4199 - RNA, 145 nt, synthetic construct
  source 1..145: mol_type = other RNA; note = pegRNA
ggtgtcacactgaagtccttgttttagagctagaaatagcaagttaaaataaggctagtccgttatcaacttgaaaaagtggcaccgagtcggtgctctgggcagtgtgagtgcaaaaaagaagcaaaaggacttcagtgttttt

SEQ ID NO: 4200 - RNA, 145 nt, synthetic construct
  source 1..145: mol_type = other RNA; note = pegRNA
ggtgtcacactgaagtccttgttttagagctagaaatagcaagttaaaataaggctagtccgttatcaacttgaaaaagtggcaccgagtcggtgctctgggcagtgtgagtgcaaaaaagaagcgaaaggacttcagtgtgaca

SEQ ID NO: 4201 - RNA, 145 nt, synthetic construct
  source 1..145: mol_type = other RNA; note = pegRNA
ggtgtcacactgaagtccttgttttagagctagaaatagcaagttaaaataaggctagtccgttatcaacttgaaaaagtggcaccgagtcggtgctctgggcagtgtgagtgcaaaaaagaagcgaaaggacttcagtgttttt

SEQ ID NO: 4202 - RNA, 145 nt, synthetic construct
  source 1..145: mol_type = other RNA; note = pegRNA
ggtgtcacactgaagtccttgttttagagctagaaatagcaagttaaaataaggctagtccgttatcaacttgaaaaagtggcaccgagtcggtgctctgggcagtgtgagtgcaaaaaagaagctaaaggacttcagtgtgaca

SEQ ID NO: 4203 - RNA, 145 nt, synthetic construct
  source 1..145: mol_type = other RNA; note = pegRNA
ggtgtcacactgaagtccttgttttagagctagaaatagcaagttaaaataaggctagtccgttatcaacttgaaaaagtggcaccgagtcggtgctctgggcagtgtgagtgcaaaaaagaagctaaaggacttcagtgttttt

SEQ ID NO: 4204 - RNA, 145 nt, synthetic construct
  source 1..145: mol_type = other RNA; note = pegRNA
ggtgtcacactgaagtccttgttttagagctagaaatagcaagttaaaataaggctagtccgttatcaacttgaaaaagtggcaccgagtcggtgctgggcagtgtgagtgcaaaaaagaagcaaaaggacttcagtgtgatttt

SEQ ID NO: 4205 - RNA, 145 nt, synthetic construct
  source 1..145: mol_type = other RNA; note = pegRNA
ggtgtcacactgaagtccttgttttagagctagaaatagcaagttaaaataaggctagtccgttatcaacttgaaaaagtggcaccgagtcggtgctgggcagtgtgagtgcaaaaaagaagcgaaaggacttcagtgtgatttt

SEQ ID NO: 4206 - RNA, 145 nt, synthetic construct
  source 1..145: mol_type = other RNA; note = pegRNA
ggtgtcacactgaagtccttgttttagagctagaaatagcaagttaaaataaggctagtccgttatcaacttgaaaaagtggcaccgagtcggtgctgggcagtgtgagtgcaaaaaagaagctaaaggacttcagtgtgatttt

SEQ ID NO: 4207 - RNA, 146 nt, synthetic construct
  source 1..146: mol_type = other RNA; note = pegRNA
ggtgtcacactgaagtccttgttttagagctagaaatagcaagttaaaataaggctagtccgttatcaacttgaaaaagtggcaccgagtcggtgcactctgggcagtgtgagtgcaaaaaagaagcaaaaggacttcagtgtgac

SEQ ID NO: 4208 - RNA, 146 nt, synthetic construct
  source 1..146: mol_type = other RNA; note = pegRNA
ggtgtcacactgaagtccttgttttagagctagaaatagcaagttaaaataaggctagtccgttatcaacttgaaaaagtggcaccgagtcggtgcactctgggcagtgtgagtgcaaaaaagaagcaaaaggacttcagtgtttt

SEQ ID NO: 4209 - RNA, 146 nt, synthetic construct
  source 1..146: mol_type = other RNA; note = pegRNA
ggtgtcacactgaagtccttgttttagagctagaaatagcaagttaaaataaggctagtccgttatcaacttgaaaaagtggcaccgagtcggtgcactctgggcagtgtgagtgcaaaaaagaagcgaaaggacttcagtgtgac

SEQ ID NO: 4210 - RNA, 146 nt, synthetic construct
  source 1..146: mol_type = other RNA; note = pegRNA
ggtgtcacactgaagtccttgttttagagctagaaatagcaagttaaaataaggctagtccgttatcaacttgaaaaagtggcaccgagtcggtgcactctgggcagtgtgagtgcaaaaaagaagcgaaaggacttcagtgtttt

SEQ ID NO: 4211 - RNA, 146 nt, synthetic construct
  source 1..146: mol_type = other RNA; note = pegRNA
ggtgtcacactgaagtccttgttttagagctagaaatagcaagttaaaataaggctagtccgttatcaacttgaaaaagtggcaccgagtcggtgcactctgggcagtgtgagtgcaaaaaagaagctaaaggacttcagtgtgac

SEQ ID NO: 4212 - RNA, 146 nt, synthetic construct
  source 1..146: mol_type = other RNA; note = pegRNA
ggtgtcacactgaagtccttgttttagagctagaaatagcaagttaaaataaggctagtccgttatcaacttgaaaaagtggcaccgagtcggtgcactctgggcagtgtgagtgcaaaaaagaagctaaaggacttcagtgtttt

SEQ ID NO: 4213 - RNA, 146 nt, synthetic construct
  source 1..146: mol_type = other RNA; note = pegRNA
ggtgtcacactgaagtccttgttttagagctagaaatagcaagttaaaataaggctagtccgttatcaacttgaaaaagtggcaccgagtcggtgccactctgggcagtgtgagtgcaaaaaagaagcaaaaggacttcagtgtga

SEQ ID NO: 4214 - RNA, 146 nt, synthetic construct
  source 1..146: mol_type = other RNA; note = pegRNA
ggtgtcacactgaagtccttgttttagagctagaaatagcaagttaaaataaggctagtccgttatcaacttgaaaaagtggcaccgagtcggtgccactctgggcagtgtgagtgcaaaaaagaagcaaaaggacttcagttttt

SEQ ID NO: 4215 - RNA, 146 nt, synthetic construct
  source 1..146: mol_type = other RNA; note = pegRNA
ggtgtcacactgaagtccttgttttagagctagaaatagcaagttaaaataaggctagtccgttatcaacttgaaaaagtggcaccgagtcggtgccactctgggcagtgtgagtgcaaaaaagaagcgaaaggacttcagtgtga

SEQ ID NO: 4216 - RNA, 146 nt, synthetic construct
  source 1..146: mol_type = other RNA; note = pegRNA
ggtgtcacactgaagtccttgttttagagctagaaatagcaagttaaaataaggctagtccgttatcaacttgaaaaagtggcaccgagtcggtgccactctgggcagtgtgagtgcaaaaaagaagcgaaaggacttcagttttt

SEQ ID NO: 4217 - RNA, 146 nt, synthetic construct
  source 1..146: mol_type = other RNA; note = pegRNA
ggtgtcacactgaagtccttgttttagagctagaaatagcaagttaaaataaggctagtccgttatcaacttgaaaaagtggcaccgagtcggtgccactctgggcagtgtgagtgcaaaaaagaagctaaaggacttcagtgtga

SEQ ID NO: 4218 - RNA, 146 nt, synthetic construct
  source 1..146: mol_type = other RNA; note = pegRNA
ggtgtcacactgaagtccttgttttagagctagaaatagcaagttaaaataaggctagtccgttatcaacttgaaaaagtggcaccgagtcggtgccactctgggcagtgtgagtgcaaaaaagaagctaaaggacttcagttttt

SEQ ID NO: 4219 - RNA, 146 nt, synthetic construct
  source 1..146: mol_type = other RNA; note = pegRNA
ggtgtcacactgaagtccttgttttagagctagaaatagcaagttaaaataaggctagtccgttatcaacttgaaaaagtggcaccgagtcggtgccctcactctgggcagtgtgagtgcaaaaaagaagcaaaaggacttcagtg

SEQ ID NO: 4220 - RNA, 146 nt, synthetic construct
  source 1..146: mol_type = other RNA; note = pegRNA
ggtgtcacactgaagtccttgttttagagctagaaatagcaagttaaaataaggctagtccgttatcaacttgaaaaagtggcaccgagtcggtgccctcactctgggcagtgtgagtgcaaaaaagaagcgaaaggacttcagtg

SEQ ID NO: 4221 - RNA, 146 nt, synthetic construct
  source 1..146: mol_type = other RNA; note = pegRNA
ggtgtcacactgaagtccttgttttagagctagaaatagcaagttaaaataaggctagtccgttatcaacttgaaaaagtggcaccgagtcggtgccctcactctgggcagtgtgagtgcaaaaaagaagctaaaggacttcagtg

SEQ ID NO: 4222 - RNA, 146 nt, synthetic construct
  source 1..146: mol_type = other RNA; note = pegRNA
ggtgtcacactgaagtccttgttttagagctagaaatagcaagttaaaataaggctagtccgttatcaacttgaaaaagtggcaccgagtcggtgcctcactctgggcagtgtgagtgcaaaaaagaagcaaaaggacttcagtgt

SEQ ID NO: 4223 - RNA, 146 nt, synthetic construct
  source 1..146: mol_type = other RNA; note = pegRNA
ggtgtcacactgaagtccttgttttagagctagaaatagcaagttaaaataaggctagtccgttatcaacttgaaaaagtggcaccgagtcggtgcctcactctgggcagtgtgagtgcaaaaaagaagcgaaaggacttcagtgt

SEQ ID NO: 4224 - RNA, 146 nt, synthetic construct
  source 1..146: mol_type = other RNA; note = pegRNA
ggtgtcacactgaagtccttgttttagagctagaaatagcaagttaaaataaggctagtccgttatcaacttgaaaaagtggcaccgagtcggtgcctcactctgggcagtgtgagtgcaaaaaagaagctaaaggacttcagtgt

SEQ ID NO: 4225 - RNA, 146 nt, synthetic construct
  source 1..146: mol_type = other RNA; note = pegRNA
ggtgtcacactgaagtccttgttttagagctagaaatagcaagttaaaataaggctagtccgttatcaacttgaaaaagtggcaccgagtcggtgcctctgggcagtgtgagtgcaaaaaagaagcaaaaggacttcagtgtgaca

SEQ ID NO: 4226 - RNA, 146 nt, synthetic construct
  source 1..146: mol_type = other RNA; note = pegRNA
ggtgtcacactgaagtccttgttttagagctagaaatagcaagttaaaataaggctagtccgttatcaacttgaaaaagtggcaccgagtcggtgcctctgggcagtgtgagtgcaaaaaagaagcaaaaggacttcagtgttttt

SEQ ID NO: 4227 - RNA, 146 nt, synthetic construct
  source 1..146: mol_type = other RNA; note = pegRNA
ggtgtcacactgaagtccttgttttagagctagaaatagcaagttaaaataaggctagtccgttatcaacttgaaaaagtggcaccgagtcggtgcctctgggcagtgtgagtgcaaaaaagaagcgaaaggacttcagtgtgaca

SEQ ID NO: 4228 - RNA, 146 nt, synthetic construct
  source 1..146: mol_type = other RNA; note = pegRNA
ggtgtcacactgaagtccttgttttagagctagaaatagcaagttaaaataaggctagtccgttatcaacttgaaaaagtggcaccgagtcggtgcctctgggcagtgtgagtgcaaaaaagaagcgaaaggacttcagtgttttt

SEQ ID NO: 4229 - RNA, 146 nt, synthetic construct
  source 1..146: mol_type = other RNA; note = pegRNA
ggtgtcacactgaagtccttgttttagagctagaaatagcaagttaaaataaggctagtccgttatcaacttgaaaaagtggcaccgagtcggtgcctctgggcagtgtgagtgcaaaaaagaagctaaaggacttcagtgtgaca

SEQ ID NO: 4230 - RNA, 146 nt, synthetic construct
  source 1..146: mol_type = other RNA; note = pegRNA
ggtgtcacactgaagtccttgttttagagctagaaatagcaagttaaaataaggctagtccgttatcaacttgaaaaagtggcaccgagtcggtgcctctgggcagtgtgagtgcaaaaaagaagctaaaggacttcagtgttttt

SEQ ID NO: 4231 - RNA, 146 nt, synthetic construct
  source 1..146: mol_type = other RNA; note = pegRNA
ggtgtcacactgaagtccttgttttagagctagaaatagcaagttaaaataaggctagtccgttatcaacttgaaaaagtggcaccgagtcggtgcctgggcagtgtgagtgcaaaaaagaagcaaaaggacttcagtgtgatttt

SEQ ID NO: 4232 - RNA, 146 nt, synthetic construct
  source 1..146: mol_type = other RNA; note = pegRNA
ggtgtcacactgaagtccttgttttagagctagaaatagcaagttaaaataaggctagtccgttatcaacttgaaaaagtggcaccgagtcggtgcctgggcagtgtgagtgcaaaaaagaagcgaaaggacttcagtgtgatttt

SEQ ID NO: 4233 - RNA, 146 nt, synthetic construct
  source 1..146: mol_type = other RNA; note = pegRNA
ggtgtcacactgaagtccttgttttagagctagaaatagcaagttaaaataaggctagtccgttatcaacttgaaaaagtggcaccgagtcggtgcctgggcagtgtgagtgcaaaaaagaagctaaaggacttcagtgtgatttt

SEQ ID NO: 4234 - RNA, 146 nt, synthetic construct
  source 1..146: mol_type = other RNA; note = pegRNA
ggtgtcacactgaagtccttgttttagagctagaaatagcaagttaaaataaggctagtccgttatcaacttgaaaaagtggcaccgagtcggtgcggcagtgtgagtgcaaaaaagaagcaaaaggacttcagtgtgacactttt

SEQ ID NO: 4235 - RNA, 146 nt, synthetic construct
  source 1..146: mol_type = other RNA; note = pegRNA
ggtgtcacactgaagtccttgttttagagctagaaatagcaagttaaaataaggctagtccgttatcaacttgaaaaagtggcaccgagtcggtgcggcagtgtgagtgcaaaaaagaagcgaaaggacttcagtgtgacactttt

SEQ ID NO: 4236 - RNA, 146 nt, synthetic construct
  source 1..146: mol_type = other RNA; note = pegRNA
ggtgtcacactgaagtccttgttttagagctagaaatagcaagttaaaataaggctagtccgttatcaacttgaaaaagtggcaccgagtcggtgcggcagtgtgagtgcaaaaaagaagctaaaggacttcagtgtgacactttt

SEQ ID NO: 4237 - RNA, 146 nt, synthetic construct
  source 1..146: mol_type = other RNA; note = pegRNA
ggtgtcacactgaagtccttgttttagagctagaaatagcaagttaaaataaggctagtccgttatcaacttgaaaaagtggcaccgagtcggtgcgggcagtgtgagtgcaaaaaagaagcaaaaggacttcagtgtgacatttt

SEQ ID NO: 4238 - RNA, 146 nt, synthetic construct
  source 1..146: mol_type = other RNA; note = pegRNA
ggtgtcacactgaagtccttgttttagagctagaaatagcaagttaaaataaggctagtccgttatcaacttgaaaaagtggcaccgagtcggtgcgggcagtgtgagtgcaaaaaagaagcgaaaggacttcagtgtgacatttt

SEQ ID NO: 4239 - RNA, 146 nt, synthetic construct
  source 1..146: mol_type = other RNA; note = pegRNA
ggtgtcacactgaagtccttgttttagagctagaaatagcaagttaaaataaggctagtccgttatcaacttgaaaaagtggcaccgagtcggtgcgggcagtgtgagtgcaaaaaagaagctaaaggacttcagtgtgacatttt

SEQ ID NO: 4240 - RNA, 146 nt, synthetic construct
  source 1..146: mol_type = other RNA; note = pegRNA
ggtgtcacactgaagtccttgttttagagctagaaatagcaagttaaaataaggctagtccgttatcaacttgaaaaagtggcaccgagtcggtgctcactctgggcagtgtgagtgcaaaaaagaagcaaaaggacttcagtgtg

SEQ ID NO: 4241 - RNA, 146 nt, synthetic construct
  source 1..146: mol_type = other RNA; note = pegRNA
ggtgtcacactgaagtccttgttttagagctagaaatagcaagttaaaataaggctagtccgttatcaacttgaaaaagtggcaccgagtcggtgctcactctgggcagtgtgagtgcaaaaaagaagcaaaaggacttcagtttt

SEQ ID NO: 4242 - RNA, 146 nt, synthetic construct
  source 1..146: mol_type = other RNA; note = pegRNA
ggtgtcacactgaagtccttgttttagagctagaaatagcaagttaaaataaggctagtccgttatcaacttgaaaaagtggcaccgagtcggtgctcactctgggcagtgtgagtgcaaaaaagaagcgaaaggacttcagtgtg

SEQ ID NO: 4243 - RNA, 146 nt, synthetic construct
  source 1..146: mol_type = other RNA; note = pegRNA
ggtgtcacactgaagtccttgttttagagctagaaatagcaagttaaaataaggctagtccgttatcaacttgaaaaagtggcaccgagtcggtgctcactctgggcagtgtgagtgcaaaaaagaagcgaaaggacttcagtttt

SEQ ID NO: 4244 - RNA, 146 nt, synthetic construct
  source 1..146: mol_type = other RNA; note = pegRNA
ggtgtcacactgaagtccttgttttagagctagaaatagcaagttaaaataaggctagtccgttatcaacttgaaaaagtggcaccgagtcggtgctcactctgggcagtgtgagtgcaaaaaagaagctaaaggacttcagtgtg

SEQ ID NO: 4245 - RNA, 146 nt, synthetic construct
  source 1..146: mol_type = other RNA; note = pegRNA
ggtgtcacactgaagtccttgttttagagctagaaatagcaagttaaaataaggctagtccgttatcaacttgaaaaagtggcaccgagtcggtgctcactctgggcagtgtgagtgcaaaaaagaagctaaaggacttcagtttt

SEQ ID NO: 4246 - RNA, 146 nt, synthetic construct
  source 1..146: mol_type = other RNA; note = pegRNA
ggtgtcacactgaagtccttgttttagagctagaaatagcaagttaaaataaggctagtccgttatcaacttgaaaaagtggcaccgagtcggtgctctgggcagtgtgagtgcaaaaaagaagcaaaaggacttcagtgtgacac

SEQ ID NO: 4247 - RNA, 146 nt, synthetic construct
  source 1..146: mol_type = other RNA; note = pegRNA
ggtgtcacactgaagtccttgttttagagctagaaatagcaagttaaaataaggctagtccgttatcaacttgaaaaagtggcaccgagtcggtgctctgggcagtgtgagtgcaaaaaagaagcaaaaggacttcagtgtgtttt

SEQ ID NO: 4248 - RNA, 146 nt, synthetic construct
  source 1..146: mol_type = other RNA; note = pegRNA
ggtgtcacactgaagtccttgttttagagctagaaatagcaagttaaaataaggctagtccgttatcaacttgaaaaagtggcaccgagtcggtgctctgggcagtgtgagtgcaaaaaagaagcgaaaggacttcagtgtgacac

SEQ ID NO: 4249 - RNA, 146 nt, synthetic construct
  source 1..146: mol_type = other RNA; note = pegRNA
ggtgtcacactgaagtccttgttttagagctagaaatagcaagttaaaataaggctagtccgttatcaacttgaaaaagtggcaccgagtcggtgctctgggcagtgtgagtgcaaaaaagaagcgaaaggacttcagtgtgtttt

SEQ ID NO: 4250 - RNA, 146 nt, synthetic construct
  source 1..146: mol_type = other RNA; note = pegRNA
ggtgtcacactgaagtccttgttttagagctagaaatagcaagttaaaataaggctagtccgttatcaacttgaaaaagtggcaccgagtcggtgctctgggcagtgtgagtgcaaaaaagaagctaaaggacttcagtgtgacac

SEQ ID NO: 4251 - RNA, 146 nt, synthetic construct
  source 1..146: mol_type = other RNA; note = pegRNA
ggtgtcacactgaagtccttgttttagagctagaaatagcaagttaaaataaggctagtccgttatcaacttgaaaaagtggcaccgagtcggtgctctgggcagtgtgagtgcaaaaaagaagctaaaggacttcagtgtgtttt

SEQ ID NO: 4252 - RNA, 146 nt, synthetic construct
  source 1..146: mol_type = other RNA; note = pegRNA
ggtgtcacactgaagtccttgttttagagctagaaatagcaagttaaaataaggctagtccgttatcaacttgaaaaagtggcaccgagtcggtgctgggcagtgtgagtgcaaaaaagaagcaaaaggacttcagtgtgactttt

SEQ ID NO: 4253 - RNA, 146 nt, synthetic construct
  source 1..146: mol_type = other RNA; note = pegRNA
ggtgtcacactgaagtccttgttttagagctagaaatagcaagttaaaataaggctagtccgttatcaacttgaaaaagtggcaccgagtcggtgctgggcagtgtgagtgcaaaaaagaagccaaaggacttcagtgtgactttt

SEQ ID NO: 4254 - RNA, 146 nt, synthetic construct
  source 1..146: mol_type = other RNA; note = pegRNA
ggtgtcacactgaagtccttgttttagagctagaaatagcaagttaaaataaggctagtccgttatcaacttgaaaaagtggcaccgagtcggtgctgggcagtgtgagtgcaaaaaagaagcgaaaggacttcagtgtgactttt

SEQ ID NO: 4255 - RNA, 146 nt, synthetic construct
  source 1..146: mol_type = other RNA; note = pegRNA
ggtgtcacactgaagtccttgttttagagctagaaatagcaagttaaaataaggctagtccgttatcaacttgaaaaagtggcaccgagtcggtgctgggcagtgtgagtgcaaaaaagaagctaaaggacttcagtgtgactttt

SEQ ID NO: 4256 - RNA, 147 nt, synthetic construct
  source 1..147: mol_type = other RNA; note = pegRNA
ggtgtcacactgaagtccttgttttagagctagaaatagcaagttaaaataaggctagtccgttatcaacttgaaaaagtggcaccgagtcggtgcactctgggcagtgtgagtgcaaaaaagaagcaaaaggacttcagtgtgaca

SEQ ID NO: 4257 - RNA, 147 nt, synthetic construct
  source 1..147: mol_type = other RNA; note = pegRNA
ggtgtcacactgaagtccttgttttagagctagaaatagcaagttaaaataaggctagtccgttatcaacttgaaaaagtggcaccgagtcggtgcactctgggcagtgtgagtgcaaaaaagaagcaaaaggacttcagtgttttt

SEQ ID NO: 4258 - RNA, 147 nt, synthetic construct
  source 1..147: mol_type = other RNA; note = pegRNA
ggtgtcacactgaagtccttgttttagagctagaaatagcaagttaaaataaggctagtccgttatcaacttgaaaaagtggcaccgagtcggtgcactctgggcagtgtgagtgcaaaaaagaagcgaaaggacttcagtgtgaca

SEQ ID NO: 4259 - RNA, 147 nt, synthetic construct
  source 1..147: mol_type = other RNA; note = pegRNA
ggtgtcacactgaagtccttgttttagagctagaaatagcaagttaaaataaggctagtccgttatcaacttgaaaaagtggcaccgagtcggtgcactctgggcagtgtgagtgcaaaaaagaagcgaaaggacttcagtgttttt

SEQ ID NO: 4260 - RNA, 147 nt, synthetic construct
  source 1..147: mol_type = other RNA; note = pegRNA
ggtgtcacactgaagtccttgttttagagctagaaatagcaagttaaaataaggctagtccgttatcaacttgaaaaagtggcaccgagtcggtgcactctgggcagtgtgagtgcaaaaaagaagctaaaggacttcagtgtgaca

SEQ ID NO: 4261 - RNA, 147 nt, synthetic construct
  source 1..147: mol_type = other RNA; note = pegRNA
ggtgtcacactgaagtccttgttttagagctagaaatagcaagttaaaataaggctagtccgttatcaacttgaaaaagtggcaccgagtcggtgcactctgggcagtgtgagtgcaaaaaagaagctaaaggacttcagtgttttt

SEQ ID NO: 4262 - RNA, 147 nt, synthetic construct
  source 1..147: mol_type = other RNA; note = pegRNA
ggtgtcacactgaagtccttgttttagagctagaaatagcaagttaaaataaggctagtccgttatcaacttgaaaaagtggcaccgagtcggtgccactctgggcagtgtgagtgcaaaaaagaagcaaaaggacttcagtgtgac

SEQ ID NO: 4263 - RNA, 147 nt, synthetic construct
  source 1..147: mol_type = other RNA; note = pegRNA
ggtgtcacactgaagtccttgttttagagctagaaatagcaagttaaaataaggctagtccgttatcaacttgaaaaagtggcaccgagtcggtgccactctgggcagtgtgagtgcaaaaaagaagcaaaaggacttcagtgtttt

SEQ ID NO: 4264 - RNA, 147 nt, synthetic construct
  source 1..147: mol_type = other RNA; note = pegRNA
ggtgtcacactgaagtccttgttttagagctagaaatagcaagttaaaataaggctagtccgttatcaacttgaaaaagtggcaccgagtcggtgccactctgggcagtgtgagtgcaaaaaagaagcgaaaggacttcagtgtgac

SEQ ID NO: 4265 - RNA, 147 nt, synthetic construct
  source 1..147: mol_type = other RNA; note = pegRNA
ggtgtcacactgaagtccttgttttagagctagaaatagcaagttaaaataaggctagtccgttatcaacttgaaaaagtggcaccgagtcggtgccactctgggcagtgtgagtgcaaaaaagaagcgaaaggacttcagtgtttt

SEQ ID NO: 4266 - RNA, 147 nt, synthetic construct
  source 1..147: mol_type = other RNA; note = pegRNA
ggtgtcacactgaagtccttgttttagagctagaaatagcaagttaaaataaggctagtccgttatcaacttgaaaaagtggcaccgagtcggtgccactctgggcagtgtgagtgcaaaaaagaagctaaaggacttcagtgtgac

SEQ ID NO: 4267 - RNA, 147 nt, synthetic construct
  source 1..147: mol_type = other RNA; note = pegRNA
ggtgtcacactgaagtccttgttttagagctagaaatagcaagttaaaataaggctagtccgttatcaacttgaaaaagtggcaccgagtcggtgccactctgggcagtgtgagtgcaaaaaagaagctaaaggacttcagtgtttt

SEQ ID NO: 4268 - RNA, 147 nt, synthetic construct
  source 1..147: mol_type = other RNA; note = pegRNA
ggtgtcacactgaagtccttgttttagagctagaaatagcaagttaaaataaggctagtccgttatcaacttgaaaaagtggcaccgagtcggtgccctcactctgggcagtgtgagtgcaaaaaagaagcaaaaggacttcagtgt

SEQ ID NO: 4269 - RNA, 147 nt, synthetic construct
  source 1..147: mol_type = other RNA; note = pegRNA
ggtgtcacactgaagtccttgttttagagctagaaatagcaagttaaaataaggctagtccgttatcaacttgaaaaagtggcaccgagtcggtgccctcactctgggcagtgtgagtgcaaaaaagaagcgaaaggacttcagtgt

SEQ ID NO: 4270 - RNA, 147 nt, synthetic construct
  source 1..147: mol_type = other RNA; note = pegRNA
ggtgtcacactgaagtccttgttttagagctagaaatagcaagttaaaataaggctagtccgttatcaacttgaaaaagtggcaccgagtcggtgccctcactctgggcagtgtgagtgcaaaaaagaagctaaaggacttcagtgt

SEQ ID NO: 4271 - RNA, 147 nt, synthetic construct
  source 1..147: mol_type = other RNA; note = pegRNA
ggtgtcacactgaagtccttgttttagagctagaaatagcaagttaaaataaggctagtccgttatcaacttgaaaaagtggcaccgagtcggtgcctcactctgggcagtgtgagtgcaaaaaagaagcaaaaggacttcagtgtg

SEQ ID NO: 4272 - RNA, 147 nt, synthetic construct
  source 1..147: mol_type = other RNA; note = pegRNA
ggtgtcacactgaagtccttgttttagagctagaaatagcaagttaaaataaggctagtccgttatcaacttgaaaaagtggcaccgagtcggtgcctcactctgggcagtgtgagtgcaaaaaagaagcaaaaggacttcagtttt

SEQ ID NO: 4273 - RNA, 147 nt, synthetic construct
  source 1..147: mol_type = other RNA; note = pegRNA
ggtgtcacactgaagtccttgttttagagctagaaatagcaagttaaaataaggctagtccgttatcaacttgaaaaagtggcaccgagtcggtgcctcactctgggcagtgtgagtgcaaaaaagaagcgaaaggacttcagtgtg

SEQ ID NO: 4274 - RNA, 147 nt, synthetic construct
  source 1..147: mol_type = other RNA; note = pegRNA
ggtgtcacactgaagtccttgttttagagctagaaatagcaagttaaaataaggctagtccgttatcaacttgaaaaagtggcaccgagtcggtgcctcactctgggcagtgtgagtgcaaaaaagaagcgaaaggacttcagtttt

SEQ ID NO: 4275 - RNA, 147 nt, synthetic construct
  source 1..147: mol_type = other RNA; note = pegRNA
ggtgtcacactgaagtccttgttttagagctagaaatagcaagttaaaataaggctagtccgttatcaacttgaaaaagtggcaccgagtcggtgcctcactctgggcagtgtgagtgcaaaaaagaagctaaaggacttcagtgtg

SEQ ID NO: 4276 - RNA, 147 nt, synthetic construct
  source 1..147: mol_type = other RNA; note = pegRNA
ggtgtcacactgaagtccttgttttagagctagaaatagcaagttaaaataaggctagtccgttatcaacttgaaaaagtggcaccgagtcggtgcctcactctgggcagtgtgagtgcaaaaaagaagctaaaggacttcagtttt

SEQ ID NO: 4277 - RNA, 147 nt, synthetic construct
  source 1..147: mol_type = other RNA; note = pegRNA
ggtgtcacactgaagtccttgttttagagctagaaatagcaagttaaaataaggctagtccgttatcaacttgaaaaagtggcaccgagtcggtgcctctgggcagtgtgagtgcaaaaaagaagcaaaaggacttcagtgtgacac

SEQ ID NO: 4278 - RNA, 147 nt, synthetic construct
  source 1..147: mol_type = other RNA; note = pegRNA
ggtgtcacactgaagtccttgttttagagctagaaatagcaagttaaaataaggctagtccgttatcaacttgaaaaagtggcaccgagtcggtgcctctgggcagtgtgagtgcaaaaaagaagcaaaaggacttcagtgtgtttt

SEQ ID NO: 4279 - RNA, 147 nt, synthetic construct
  source 1..147: mol_type = other RNA; note = pegRNA
ggtgtcacactgaagtccttgttttagagctagaaatagcaagttaaaataaggctagtccgttatcaacttgaaaaagtggcaccgagtcggtgcctctgggcagtgtgagtgcaaaaaagaagcgaaaggacttcagtgtgacac

SEQ ID NO: 4280 - RNA, 147 nt, synthetic construct
  source 1..147: mol_type = other RNA; note = pegRNA
ggtgtcacactgaagtccttgttttagagctagaaatagcaagttaaaataaggctagtccgttatcaacttgaaaaagtggcaccgagtcggtgcctctgggcagtgtgagtgcaaaaaagaagcgaaaggacttcagtgtgtttt

SEQ ID NO: 4281 - RNA, 147 nt, synthetic construct
  source 1..147: mol_type = other RNA; note = pegRNA
ggtgtcacactgaagtccttgttttagagctagaaatagcaagttaaaataaggctagtccgttatcaacttgaaaaagtggcaccgagtcggtgcctctgggcagtgtgagtgcaaaaaagaagctaaaggacttcagtgtgacac

SEQ ID NO: 4282 - RNA, 147 nt, synthetic construct
  source 1..147: mol_type = other RNA; note = pegRNA
ggtgtcacactgaagtccttgttttagagctagaaatagcaagttaaaataaggctagtccgttatcaacttgaaaaagtggcaccgagtcggtgcctctgggcagtgtgagtgcaaaaaagaagctaaaggacttcagtgtgtttt

SEQ ID NO: 4283 - RNA, 147 nt, synthetic construct
  source 1..147: mol_type = other RNA; note = pegRNA
ggtgtcacactgaagtccttgttttagagctagaaatagcaagttaaaataaggctagtccgttatcaacttgaaaaagtggcaccgagtcggtgcctgggcagtgtgagtgcaaaaaagaagcaaaaggacttcagtgtgactttt

SEQ ID NO: 4284 - RNA, 147 nt, synthetic construct
  source 1..147: mol_type = other RNA; note = pegRNA
ggtgtcacactgaagtccttgttttagagctagaaatagcaagttaaaataaggctagtccgttatcaacttgaaaaagtggcaccgagtcggtgcctgggcagtgtgagtgcaaaaaagaagcgaaaggacttcagtgtgactttt

SEQ ID NO: 4285 - RNA, 147 nt, synthetic construct
  source 1..147: mol_type = other RNA; note = pegRNA
ggtgtcacactgaagtccttgttttagagctagaaatagcaagttaaaataaggctagtccgttatcaacttgaaaaagtggcaccgagtcggtgcctgggcagtgtgagtgcaaaaaagaagctaaaggacttcagtgtgactttt

SEQ ID NO: 4286 - RNA, 147 nt, synthetic construct
  source 1..147: mol_type = other RNA; note = pegRNA
ggtgtcacactgaagtccttgttttagagctagaaatagcaagttaaaataaggctagtccgttatcaacttgaaaaagtggcaccgagtcggtgcgggcagtgtgagtgcaaaaaagaagcaaaaggacttcagtgtgacactttt

SEQ ID NO: 4287 - RNA, 147 nt, synthetic construct
  source 1..147: mol_type = other RNA; note = pegRNA
ggtgtcacactgaagtccttgttttagagctagaaatagcaagttaaaataaggctagtccgttatcaacttgaaaaagtggcaccgagtcggtgcgggcagtgtgagtgcaaaaaagaagcgaaaggacttcagtgtgacactttt

SEQ ID NO: 4288 - RNA, 147 nt, synthetic construct
  source 1..147: mol_type = other RNA; note = pegRNA
ggtgtcacactgaagtccttgttttagagctagaaatagcaagttaaaataaggctagtccgttatcaacttgaaaaagtggcaccgagtcggtgcgggcagtgtgagtgcaaaaaagaagctaaaggacttcagtgtgacactttt

SEQ ID NO: 4289 - RNA, 147 nt, synthetic construct
  source 1..147: mol_type = other RNA; note = pegRNA
ggtgtcacactgaagtccttgttttagagctagaaatagcaagttaaaataaggctagtccgttatcaacttgaaaaagtggcaccgagtcggtgctcactctgggcagtgtgagtgcaaaaaagaagcaaaaggacttcagtgtga

SEQ ID NO: 4290 - RNA, 147 nt, synthetic construct
  source 1..147: mol_type = other RNA; note = pegRNA
ggtgtcacactgaagtccttgttttagagctagaaatagcaagttaaaataaggctagtccgttatcaacttgaaaaagtggcaccgagtcggtgctcactctgggcagtgtgagtgcaaaaaagaagcaaaaggacttcagttttt

SEQ ID NO: 4291 - RNA, 147 nt, synthetic construct
  source 1..147: mol_type = other RNA; note = pegRNA
ggtgtcacactgaagtccttgttttagagctagaaatagcaagttaaaataaggctagtccgttatcaacttgaaaaagtggcaccgagtcggtgctcactctgggcagtgtgagtgcaaaaaagaagcgaaaggacttcagtgtga

SEQ ID NO: 4292 - RNA, 147 nt, synthetic construct
  source 1..147: mol_type = other RNA; note = pegRNA
ggtgtcacactgaagtccttgttttagagctagaaatagcaagttaaaataaggctagtccgttatcaacttgaaaaagtggcaccgagtcggtgctcactctgggcagtgtgagtgcaaaaaagaagcgaaaggacttcagttttt

SEQ ID NO: 4293 - RNA, 147 nt, synthetic construct
  source 1..147: mol_type = other RNA; note = pegRNA
ggtgtcacactgaagtccttgttttagagctagaaatagcaagttaaaataaggctagtccgttatcaacttgaaaaagtggcaccgagtcggtgctcactctgggcagtgtgagtgcaaaaaagaagctaaaggacttcagtgtga

SEQ ID NO: 4294 - RNA, 147 nt, synthetic construct
  source 1..147: mol_type = other RNA; note = pegRNA
ggtgtcacactgaagtccttgttttagagctagaaatagcaagttaaaataaggctagtccgttatcaacttgaaaaagtggcaccgagtcggtgctcactctgggcagtgtgagtgcaaaaaagaagctaaaggacttcagttttt

SEQ ID NO: 4295 - RNA, 147 nt, synthetic construct
  source 1..147: mol_type = other RNA; note = pegRNA
ggtgtcacactgaagtccttgttttagagctagaaatagcaagttaaaataaggctagtccgttatcaacttgaaaaagtggcaccgagtcggtgctctgggcagtgtgagtgcaaaaaagaagcaaaaggacttcagtgtgatttt

SEQ ID NO: 4296 - RNA, 147 nt, synthetic construct
  source 1..147: mol_type = other RNA; note = pegRNA
ggtgtcacactgaagtccttgttttagagctagaaatagcaagttaaaataaggctagtccgttatcaacttgaaaaagtggcaccgagtcggtgctctgggcagtgtgagtgcaaaaaagaagcgaaaggacttcagtgtgatttt

SEQ ID NO: 4297 - RNA, 147 nt, synthetic construct
  source 1..147: mol_type = other RNA; note = pegRNA
ggtgtcacactgaagtccttgttttagagctagaaatagcaagttaaaataaggctagtccgttatcaacttgaaaaagtggcaccgagtcggtgctctgggcagtgtgagtgcaaaaaagaagctaaaggacttcagtgtgatttt

SEQ ID NO: 4298 - RNA, 147 nt, synthetic construct
  source 1..147: mol_type = other RNA; note = pegRNA
ggtgtcacactgaagtccttgttttagagctagaaatagcaagttaaaataaggctagtccgttatcaacttgaaaaagtggcaccgagtcggtgctgggcagtgtgagtgcaaaaaagaagcaaaaggacttcagtgtgacatttt

SEQ ID NO: 4299 - RNA, 147 nt, synthetic construct
  source 1..147: mol_type = other RNA; note = pegRNA
ggtgtcacactgaagtccttgttttagagctagaaatagcaagttaaaataaggctagtccgttatcaacttgaaaaagtggcaccgagtcggtgctgggcagtgtgagtgcaaaaaagaagcgaaaggacttcagtgtgacatttt

SEQ ID NO: 4300 - RNA, 147 nt, synthetic construct
  source 1..147: mol_type = other RNA; note = pegRNA
ggtgtcacactgaagtccttgttttagagctagaaatagcaagttaaaataaggctagtccgttatcaacttgaaaaagtggcaccgagtcggtgctgggcagtgtgagtgcaaaaaagaagctaaaggacttcagtgtgacatttt

SEQ ID NO: 4301 - RNA, 148 nt, synthetic construct
  source 1..148: mol_type = other RNA; note = pegRNA
ggtgtcacactgaagtccttgttttagagctagaaatagcaagttaaaataaggctagtccgttatcaacttgaaaaagtggcaccgagtcggtgcactctgggcagtgtgagtgcaaaaaagaagcaaaaggacttcagtgtgacac

SEQ ID NO: 4302 - RNA, 148 nt, synthetic construct
  source 1..148: mol_type = other RNA; note = pegRNA
ggtgtcacactgaagtccttgttttagagctagaaatagcaagttaaaataaggctagtccgttatcaacttgaaaaagtggcaccgagtcggtgcactctgggcagtgtgagtgcaaaaaagaagcaaaaggacttcagtgtgtttt

SEQ ID NO: 4303 - RNA, 148 nt, synthetic construct
  source 1..148: mol_type = other RNA; note = pegRNA
ggtgtcacactgaagtccttgttttagagctagaaatagcaagttaaaataaggctagtccgttatcaacttgaaaaagtggcaccgagtcggtgcactctgggcagtgtgagtgcaaaaaagaagcgaaaggacttcagtgtgacac

SEQ ID NO: 4304 - RNA, 148 nt, synthetic construct
  source 1..148: mol_type = other RNA; note = pegRNA
ggtgtcacactgaagtccttgttttagagctagaaatagcaagttaaaataaggctagtccgttatcaacttgaaaaagtggcaccgagtcggtgcactctgggcagtgtgagtgcaaaaaagaagcgaaaggacttcagtgtgtttt

SEQ ID NO: 4305 - RNA, 148 nt, synthetic construct
  source 1..148: mol_type = other RNA; note = pegRNA
ggtgtcacactgaagtccttgttttagagctagaaatagcaagttaaaataaggctagtccgttatcaacttgaaaaagtggcaccgagtcggtgcactctgggcagtgtgagtgcaaaaaagaagctaaaggacttcagtgtgacac

SEQ ID NO: 4306 - RNA, 148 nt, synthetic construct
  source 1..148: mol_type = other RNA; note = pegRNA
ggtgtcacactgaagtccttgttttagagctagaaatagcaagttaaaataaggctagtccgttatcaacttgaaaaagtggcaccgagtcggtgcactctgggcagtgtgagtgcaaaaaagaagctaaaggacttcagtgtgtttt

SEQ ID NO: 4307 - RNA, 148 nt, synthetic construct
  source 1..148: mol_type = other RNA; note = pegRNA
ggtgtcacactgaagtccttgttttagagctagaaatagcaagttaaaataaggctagtccgttatcaacttgaaaaagtggcaccgagtcggtgccactctgggcagtgtgagtgcaaaaaagaagcaaaaggacttcagtgtgaca

SEQ ID NO: 4308 - RNA, 148 nt, synthetic construct
  source 1..148: mol_type = other RNA; note = pegRNA
ggtgtcacactgaagtccttgttttagagctagaaatagcaagttaaaataaggctagtccgttatcaacttgaaaaagtggcaccgagtcggtgccactctgggcagtgtgagtgcaaaaaagaagcaaaaggacttcagtgttttt

SEQ ID NO: 4309 - RNA, 148 nt, synthetic construct
  source 1..148: mol_type = other RNA; note = pegRNA
ggtgtcacactgaagtccttgttttagagctagaaatagcaagttaaaataaggctagtccgttatcaacttgaaaaagtggcaccgagtcggtgccactctgggcagtgtgagtgcaaaaaagaagcgaaaggacttcagtgtgaca

SEQ ID NO: 4310 - RNA, 148 nt, synthetic construct
  source 1..148: mol_type = other RNA; note = pegRNA
ggtgtcacactgaagtccttgttttagagctagaaatagcaagttaaaataaggctagtccgttatcaacttgaaaaagtggcaccgagtcggtgccactctgggcagtgtgagtgcaaaaaagaagcgaaaggacttcagtgttttt

SEQ ID NO: 4311 - RNA, 148 nt, synthetic construct
  source 1..148: mol_type = other RNA; note = pegRNA
ggtgtcacactgaagtccttgttttagagctagaaatagcaagttaaaataaggctagtccgttatcaacttgaaaaagtggcaccgagtcggtgccactctgggcagtgtgagtgcaaaaaagaagctaaaggacttcagtgtgaca

SEQ ID NO: 4312 - RNA, 148 nt, synthetic construct
  source 1..148: mol_type = other RNA; note = pegRNA
ggtgtcacactgaagtccttgttttagagctagaaatagcaagttaaaataaggctagtccgttatcaacttgaaaaagtggcaccgagtcggtgccactctgggcagtgtgagtgcaaaaaagaagctaaaggacttcagtgttttt

SEQ ID NO: 4313 - RNA, 148 nt, synthetic construct
  source 1..148: mol_type = other RNA; note = pegRNA
ggtgtcacactgaagtccttgttttagagctagaaatagcaagttaaaataaggctagtccgttatcaacttgaaaaagtggcaccgagtcggtgccctcactctgggcagtgtgagtgcaaaaaagaagcaaaaggacttcagtgtg

SEQ ID NO: 4314 - RNA, 148 nt, synthetic construct
  source 1..148: mol_type = other RNA; note = pegRNA
ggtgtcacactgaagtccttgttttagagctagaaatagcaagttaaaataaggctagtccgttatcaacttgaaaaagtggcaccgagtcggtgccctcactctgggcagtgtgagtgcaaaaaagaagcaaaaggacttcagtttt

SEQ ID NO: 4315 - RNA, 148 nt, synthetic construct
  source 1..148: mol_type = other RNA; note = pegRNA
ggtgtcacactgaagtccttgttttagagctagaaatagcaagttaaaataaggctagtccgttatcaacttgaaaaagtggcaccgagtcggtgccctcactctgggcagtgtgagtgcaaaaaagaagcgaaaggacttcagtgtg

SEQ ID NO: 4316 - RNA, 148 nt, synthetic construct
  source 1..148: mol_type = other RNA; note = pegRNA
ggtgtcacactgaagtccttgttttagagctagaaatagcaagttaaaataaggctagtccgttatcaacttgaaaaagtggcaccgagtcggtgccctcactctgggcagtgtgagtgcaaaaaagaagcgaaaggacttcagtttt

SEQ ID NO: 4317 - RNA, 148 nt, synthetic construct
  source 1..148: mol_type = other RNA; note = pegRNA
ggtgtcacactgaagtccttgttttagagctagaaatagcaagttaaaataaggctagtccgttatcaacttgaaaaagtggcaccgagtcggtgccctcactctgggcagtgtgagtgcaaaaaagaagctaaaggacttcagtgtg

SEQ ID NO: 4318 - RNA, 148 nt, synthetic construct
  source 1..148: mol_type = other RNA; note = pegRNA
ggtgtcacactgaagtccttgttttagagctagaaatagcaagttaaaataaggctagtccgttatcaacttgaaaaagtggcaccgagtcggtgccctcactctgggcagtgtgagtgcaaaaaagaagctaaaggacttcagtttt

SEQ ID NO: 4319 - RNA, 148 nt, synthetic construct
  source 1..148: mol_type = other RNA; note = pegRNA
ggtgtcacactgaagtccttgttttagagctagaaatagcaagttaaaataaggctagtccgttatcaacttgaaaaagtggcaccgagtcggtgcctcactctgggcagtgtgagtgcaaaaaagaagcaaaaggacttcagtgtga

SEQ ID NO: 4320 - RNA, 148 nt, synthetic construct
  source 1..148: mol_type = other RNA; note = pegRNA
ggtgtcacactgaagtccttgttttagagctagaaatagcaagttaaaataaggctagtccgttatcaacttgaaaaagtggcaccgagtcggtgcctcactctgggcagtgtgagtgcaaaaaagaagcaaaaggacttcagttttt

SEQ ID NO: 4321 - RNA, 148 nt, synthetic construct
  source 1..148: mol_type = other RNA; note = pegRNA
ggtgtcacactgaagtccttgttttagagctagaaatagcaagttaaaataaggctagtccgttatcaacttgaaaaagtggcaccgagtcggtgcctcactctgggcagtgtgagtgcaaaaaagaagcgaaaggacttcagtgtga

SEQ ID NO: 4322 - RNA, 148 nt, synthetic construct
  source 1..148: mol_type = other RNA; note = pegRNA
ggtgtcacactgaagtccttgttttagagctagaaatagcaagttaaaataaggctagtccgttatcaacttgaaaaagtggcaccgagtcggtgcctcactctgggcagtgtgagtgcaaaaaagaagcgaaaggacttcagttttt

SEQ ID NO: 4323 - RNA, 148 nt, synthetic construct
  source 1..148: mol_type = other RNA; note = pegRNA
ggtgtcacactgaagtccttgttttagagctagaaatagcaagttaaaataaggctagtccgttatcaacttgaaaaagtggcaccgagtcggtgcctcactctgggcagtgtgagtgcaaaaaagaagctaaaggacttcagtgtga

SEQ ID NO: 4324 - RNA, 148 nt, synthetic construct
  source 1..148: mol_type = other RNA; note = pegRNA
ggtgtcacactgaagtccttgttttagagctagaaatagcaagttaaaataaggctagtccgttatcaacttgaaaaagtggcaccgagtcggtgcctcactctgggcagtgtgagtgcaaaaaagaagctaaaggacttcagttttt

SEQ ID NO: 4325 - RNA, 148 nt, synthetic construct
  source 1..148: mol_type = other RNA; note = pegRNA
ggtgtcacactgaagtccttgttttagagctagaaatagcaagttaaaataaggctagtccgttatcaacttgaaaaagtggcaccgagtcggtgcctctgggcagtgtgagtgcaaaaaagaagcaaaaggacttcagtgtgatttt

SEQ ID NO: 4326 - RNA, 148 nt, synthetic construct
  source 1..148: mol_type = other RNA; note = pegRNA
ggtgtcacactgaagtccttgttttagagctagaaatagcaagttaaaataaggctagtccgttatcaacttgaaaaagtggcaccgagtcggtgcctctgggcagtgtgagtgcaaaaaagaagcgaaaggacttcagtgtgatttt

SEQ ID NO: 4327 - RNA, 148 nt, synthetic construct
  source 1..148: mol_type = other RNA; note = pegRNA
ggtgtcacactgaagtccttgttttagagctagaaatagcaagttaaaataaggctagtccgttatcaacttgaaaaagtggcaccgagtcggtgcctctgggcagtgtgagtgcaaaaaagaagctaaaggacttcagtgtgatttt

SEQ ID NO: 4328 - RNA, 148 nt, synthetic construct
  source 1..148: mol_type = other RNA; note = pegRNA
ggtgtcacactgaagtccttgttttagagctagaaatagcaagttaaaataaggctagtccgttatcaacttgaaaaagtggcaccgagtcggtgcctgggcagtgtgagtgcaaaaaagaagcaaaaggacttcagtgtgacatttt

SEQ ID NO: 4329 - RNA, 148 nt, synthetic construct
  source 1..148: mol_type = other RNA; note = pegRNA
ggtgtcacactgaagtccttgttttagagctagaaatagcaagttaaaataaggctagtccgttatcaacttgaaaaagtggcaccgagtcggtgcctgggcagtgtgagtgcaaaaaagaagcgaaaggacttcagtgtgacatttt

SEQ ID NO: 4330 - RNA, 148 nt, synthetic construct
  source 1..148: mol_type = other RNA; note = pegRNA
ggtgtcacactgaagtccttgttttagagctagaaatagcaagttaaaataaggctagtccgttatcaacttgaaaaagtggcaccgagtcggtgcctgggcagtgtgagtgcaaaaaagaagctaaaggacttcagtgtgacatttt

SEQ ID NO: 4331 - RNA, 148 nt, synthetic construct
  source 1..148: mol_type = other RNA; note = pegRNA
ggtgtcacactgaagtccttgttttagagctagaaatagcaagttaaaataaggctagtccgttatcaacttgaaaaagtggcaccgagtcggtgctcactctgggcagtgtgagtgcaaaaaagaagcaaaaggacttcagtgtgac

SEQ ID NO: 4332 - RNA, 148 nt, synthetic construct
  source 1..148: mol_type = other RNA; note = pegRNA
ggtgtcacactgaagtccttgttttagagctagaaatagcaagttaaaataaggctagtccgttatcaacttgaaaaagtggcaccgagtcggtgctcactctgggcagtgtgagtgcaaaaaagaagcaaaaggacttcagtgtttt

SEQ ID NO: 4333 - RNA, 148 nt, synthetic construct
  source 1..148: mol_type = other RNA; note = pegRNA
ggtgtcacactgaagtccttgttttagagctagaaatagcaagttaaaataaggctagtccgttatcaacttgaaaaagtggcaccgagtcggtgctcactctgggcagtgtgagtgcaaaaaagaagcgaaaggacttcagtgtgac

SEQ ID NO: 4334 - RNA, 148 nt, synthetic construct
  source 1..148: mol_type = other RNA; note = pegRNA
ggtgtcacactgaagtccttgttttagagctagaaatagcaagttaaaataaggctagtccgttatcaacttgaaaaagtggcaccgagtcggtgctcactctgggcagtgtgagtgcaaaaaagaagcgaaaggacttcagtgtttt

SEQ ID NO: 4335 - RNA, 148 nt, synthetic construct
  source 1..148: mol_type = other RNA; note = pegRNA
ggtgtcacactgaagtccttgttttagagctagaaatagcaagttaaaataaggctagtccgttatcaacttgaaaaagtggcaccgagtcggtgctcactctgggcagtgtgagtgcaaaaaagaagctaaaggacttcagtgtgac

SEQ ID NO: 4336 - RNA, 148 nt, synthetic construct
  source 1..148: mol_type = other RNA; note = pegRNA
ggtgtcacactgaagtccttgttttagagctagaaatagcaagttaaaataaggctagtccgttatcaacttgaaaaagtggcaccgagtcggtgctcactctgggcagtgtgagtgcaaaaaagaagctaaaggacttcagtgtttt

SEQ ID NO: 4337 - RNA, 148 nt, synthetic construct
  source 1..148: mol_type = other RNA; note = pegRNA
ggtgtcacactgaagtccttgttttagagctagaaatagcaagttaaaataaggctagtccgttatcaacttgaaaaagtggcaccgagtcggtgctctgggcagtgtgagtgcaaaaaagaagcaaaaggacttcagtgtgactttt

SEQ ID NO: 4338 - RNA, 148 nt, synthetic construct
  source 1..148: mol_type = other RNA; note = pegRNA
ggtgtcacactgaagtccttgttttagagctagaaatagcaagttaaaataaggctagtccgttatcaacttgaaaaagtggcaccgagtcggtgctctgggcagtgtgagtgcaaaaaagaagcgaaaggacttcagtgtgactttt

SEQ ID NO: 4339 - RNA, 148 nt, synthetic construct
  source 1..148: mol_type = other RNA; note = pegRNA
ggtgtcacactgaagtccttgttttagagctagaaatagcaagttaaaataaggctagtccgttatcaacttgaaaaagtggcaccgagtcggtgctctgggcagtgtgagtgcaaaaaagaagctaaaggacttcagtgtgactttt

SEQ ID NO: 4340 - RNA, 148 nt, synthetic construct
  source 1..148: mol_type = other RNA; note = pegRNA
ggtgtcacactgaagtccttgttttagagctagaaatagcaagttaaaataaggctagtccgttatcaacttgaaaaagtggcaccgagtcggtgctgggcagtgtgagtgcaaaaaagaagcaaaaggacttcagtgtgacactttt

SEQ ID NO: 4341 - RNA, 148 nt, synthetic construct
  source 1..148: mol_type = other RNA; note = pegRNA
ggtgtcacactgaagtccttgttttagagctagaaatagcaagttaaaataaggctagtccgttatcaacttgaaaaagtggcaccgagtcggtgctgggcagtgtgagtgcaaaaaagaagcgaaaggacttcagtgtgacactttt

SEQ ID NO: 4342 - RNA, 148 nt, synthetic construct
  source 1..148: mol_type = other RNA; note = pegRNA
ggtgtcacactgaagtccttgttttagagctagaaatagcaagttaaaataaggctagtccgttatcaacttgaaaaagtggcaccgagtcggtgctgggcagtgtgagtgcaaaaaagaagctaaaggacttcagtgtgacactttt

SEQ ID NO: 4343 - RNA, 149 nt, synthetic construct
  source 1..149: mol_type = other RNA; note = pegRNA
ggtgtcacactgaagtccttgttttagagctagaaatagcaagttaaaataaggctagtccgttatcaacttgaaaaagtggcaccgagtcggtgcactctgggcagtgtgagtgcaaaaaagaagcaaaaggacttcagtgtgatttt

SEQ ID NO: 4344 - RNA, 149 nt, synthetic construct
  source 1..149: mol_type = other RNA; note = pegRNA
ggtgtcacactgaagtccttgttttagagctagaaatagcaagttaaaataaggctagtccgttatcaacttgaaaaagtggcaccgagtcggtgcactctgggcagtgtgagtgcaaaaaagaagcgaaaggacttcagtgtgatttt

SEQ ID NO: 4345 - RNA, 149 nt, synthetic construct
  source 1..149: mol_type = other RNA; note = pegRNA
ggtgtcacactgaagtccttgttttagagctagaaatagcaagttaaaataaggctagtccgttatcaacttgaaaaagtggcaccgagtcggtgcactctgggcagtgtgagtgcaaaaaagaagctaaaggacttcagtgtgatttt

SEQ ID NO: 4346 - RNA, 149 nt, synthetic construct
  source 1..149: mol_type = other RNA; note = pegRNA
ggtgtcacactgaagtccttgttttagagctagaaatagcaagttaaaataaggctagtccgttatcaacttgaaaaagtggcaccgagtcggtgccactctgggcagtgtgagtgcaaaaaagaagcaaaaggacttcagtgtgacac

SEQ ID NO: 4347 - RNA, 149 nt, synthetic construct
  source 1..149: mol_type = other RNA; note = pegRNA
ggtgtcacactgaagtccttgttttagagctagaaatagcaagttaaaataaggctagtccgttatcaacttgaaaaagtggcaccgagtcggtgccactctgggcagtgtgagtgcaaaaaagaagcaaaaggacttcagtgtgtttt

SEQ ID NO: 4348 - RNA, 149 nt, synthetic construct
  source 1..149: mol_type = other RNA; note = pegRNA
ggtgtcacactgaagtccttgttttagagctagaaatagcaagttaaaataaggctagtccgttatcaacttgaaaaagtggcaccgagtcggtgccactctgggcagtgtgagtgcaaaaaagaagcgaaaggacttcagtgtgacac

SEQ ID NO: 4349 - RNA, 149 nt, synthetic construct
  source 1..149: mol_type = other RNA; note = pegRNA
ggtgtcacactgaagtccttgttttagagctagaaatagcaagttaaaataaggctagtccgttatcaacttgaaaaagtggcaccgagtcggtgccactctgggcagtgtgagtgcaaaaaagaagcgaaaggacttcagtgtgtttt

SEQ ID NO: 4350 - RNA, 149 nt, synthetic construct
  source 1..149: mol_type = other RNA; note = pegRNA
ggtgtcacactgaagtccttgttttagagctagaaatagcaagttaaaataaggctagtccgttatcaacttgaaaaagtggcaccgagtcggtgccactctgggcagtgtgagtgcaaaaaagaagctaaaggacttcagtgtgacac

SEQ ID NO: 4351 - RNA, 149 nt, synthetic construct
  source 1..149: mol_type = other RNA; note = pegRNA
ggtgtcacactgaagtccttgttttagagctagaaatagcaagttaaaataaggctagtccgttatcaacttgaaaaagtggcaccgagtcggtgccactctgggcagtgtgagtgcaaaaaagaagctaaaggacttcagtgtgtttt

SEQ ID NO: 4352 - RNA, 149 nt, synthetic construct
  source 1..149: mol_type = other RNA; note = pegRNA
ggtgtcacactgaagtccttgttttagagctagaaatagcaagttaaaataaggctagtccgttatcaacttgaaaaagtggcaccgagtcggtgccctcactctgggcagtgtgagtgcaaaaaagaagcaaaaggacttcagtgtga

SEQ ID NO: 4353 - RNA, 149 nt, synthetic construct
  source 1..149: mol_type = other RNA; note = pegRNA
ggtgtcacactgaagtccttgttttagagctagaaatagcaagttaaaataaggctagtccgttatcaacttgaaaaagtggcaccgagtcggtgccctcactctgggcagtgtgagtgcaaaaaagaagcaaaaggacttcagttttt

SEQ ID NO: 4354 - RNA, 149 nt, synthetic construct
  source 1..149: mol_type = other RNA; note = pegRNA
ggtgtcacactgaagtccttgttttagagctagaaatagcaagttaaaataaggctagtccgttatcaacttgaaaaagtggcaccgagtcggtgccctcactctgggcagtgtgagtgcaaaaaagaagcgaaaggacttcagtgtga

SEQ ID NO: 4355 - RNA, 149 nt, synthetic construct
  source 1..149: mol_type = other RNA; note = pegRNA
ggtgtcacactgaagtccttgttttagagctagaaatagcaagttaaaataaggctagtccgttatcaacttgaaaaagtggcaccgagtcggtgccctcactctgggcagtgtgagtgcaaaaaagaagcgaaaggacttcagttttt

SEQ ID NO: 4356 - RNA, 149 nt, synthetic construct
  source 1..149: mol_type = other RNA; note = pegRNA
ggtgtcacactgaagtccttgttttagagctagaaatagcaagttaaaataaggctagtccgttatcaacttgaaaaagtggcaccgagtcggtgccctcactctgggcagtgtgagtgcaaaaaagaagctaaaggacttcagtgtga

SEQ ID NO: 4357 - RNA, 149 nt, synthetic construct
  source 1..149: mol_type = other RNA; note = pegRNA
ggtgtcacactgaagtccttgttttagagctagaaatagcaagttaaaataaggctagtccgttatcaacttgaaaaagtggcaccgagtcggtgccctcactctgggcagtgtgagtgcaaaaaagaagctaaaggacttcagttttt

SEQ ID NO: 4358 - RNA, 149 nt, synthetic construct
  source 1..149: mol_type = other RNA; note = pegRNA
ggtgtcacactgaagtccttgttttagagctagaaatagcaagttaaaataaggctagtccgttatcaacttgaaaaagtggcaccgagtcggtgcctcactctgggcagtgtgagtgcaaaaaagaagcaaaaggacttcagtgtgac

SEQ ID NO: 4359 - RNA, 149 nt, synthetic construct
  source 1..149: mol_type = other RNA; note = pegRNA
ggtgtcacactgaagtccttgttttagagctagaaatagcaagttaaaataaggctagtccgttatcaacttgaaaaagtggcaccgagtcggtgcctcactctgggcagtgtgagtgcaaaaaagaagcaaaaggacttcagtgtttt

SEQ ID NO: 4360 - RNA, 149 nt, synthetic construct
  source 1..149: mol_type = other RNA; note = pegRNA
ggtgtcacactgaagtccttgttttagagctagaaatagcaagttaaaataaggctagtccgttatcaacttgaaaaagtggcaccgagtcggtgcctcactctgggcagtgtgagtgcaaaaaagaagcgaaaggacttcagtgtgac

SEQ ID NO: 4361 - RNA, 149 nt, synthetic construct
  source 1..149: mol_type = other RNA; note = pegRNA
ggtgtcacactgaagtccttgttttagagctagaaatagcaagttaaaataaggctagtccgttatcaacttgaaaaagtggcaccgagtcggtgcctcactctgggcagtgtgagtgcaaaaaagaagcgaaaggacttcagtgtttt

SEQ ID NO: 4362 - RNA, 149 nt, synthetic construct
  source 1..149: mol_type = other RNA; note = pegRNA
ggtgtcacactgaagtccttgttttagagctagaaatagcaagttaaaataaggctagtccgttatcaacttgaaaaagtggcaccgagtcggtgcctcactctgggcagtgtgagtgcaaaaaagaagctaaaggacttcagtgtgac

SEQ ID NO: 4363 - RNA, 149 nt, synthetic construct
  source 1..149: mol_type = other RNA; note = pegRNA
ggtgtcacactgaagtccttgttttagagctagaaatagcaagttaaaataaggctagtccgttatcaacttgaaaaagtggcaccgagtcggtgcctcactctgggcagtgtgagtgcaaaaaagaagctaaaggacttcagtgtttt

SEQ ID NO: 4364 - RNA, 149 nt, synthetic construct
  source 1..149: mol_type = other RNA; note = pegRNA
ggtgtcacactgaagtccttgttttagagctagaaatagcaagttaaaataaggctagtccgttatcaacttgaaaaagtggcaccgagtcggtgcctctgggcagtgtgagtgcaaaaaagaagcaaaaggacttcagtgtgactttt

SEQ ID NO: 4365 - RNA, 149 nt, synthetic construct
  source 1..149: mol_type = other RNA; note = pegRNA
ggtgtcacactgaagtccttgttttagagctagaaatagcaagttaaaataaggctagtccgttatcaacttgaaaaagtggcaccgagtcggtgcctctgggcagtgtgagtgcaaaaaagaagcgaaaggacttcagtgtgactttt

SEQ ID NO: 4366 - RNA, 149 nt, synthetic construct
  source 1..149: mol_type = other RNA; note = pegRNA
ggtgtcacactgaagtccttgttttagagctagaaatagcaagttaaaataaggctagtccgttatcaacttgaaaaagtggcaccgagtcggtgcctctgggcagtgtgagtgcaaaaaagaagctaaaggacttcagtgtgactttt

SEQ ID NO: 4367 - RNA, 149 nt, synthetic construct
  source 1..149: mol_type = other RNA; note = pegRNA
ggtgtcacactgaagtccttgttttagagctagaaatagcaagttaaaataaggctagtccgttatcaacttgaaaaagtggcaccgagtcggtgcctgggcagtgtgagtgcaaaaaagaagcaaaaggacttcagtgtgacactttt

SEQ ID NO: 4368 - RNA, 149 nt, synthetic construct
  source 1..149: mol_type = other RNA; note = pegRNA
ggtgtcacactgaagtccttgttttagagctagaaatagcaagttaaaataaggctagtccgttatcaacttgaaaaagtggcaccgagtcggtgcctgggcagtgtgagtgcaaaaaagaagcgaaaggacttcagtgtgacactttt

SEQ ID NO: 4369 - RNA, 149 nt, synthetic construct
  source 1..149: mol_type = other RNA; note = pegRNA
ggtgtcacactgaagtccttgttttagagctagaaatagcaagttaaaataaggctagtccgttatcaacttgaaaaagtggcaccgagtcggtgcctgggcagtgtgagtgcaaaaaagaagctaaaggacttcagtgtgacactttt

SEQ ID NO: 4370 - RNA, 149 nt, synthetic construct
  source 1..149: mol_type = other RNA; note = pegRNA
ggtgtcacactgaagtccttgttttagagctagaaatagcaagttaaaataaggctagtccgttatcaacttgaaaaagtggcaccgagtcggtgctcactctgggcagtgtgagtgcaaaaaagaagcaaaaggacttcagtgtgaca

SEQ ID NO: 4371 - RNA, 149 nt, synthetic construct
  source 1..149: mol_type = other RNA; note = pegRNA
ggtgtcacactgaagtccttgttttagagctagaaatagcaagttaaaataaggctagtccgttatcaacttgaaaaagtggcaccgagtcggtgctcactctgggcagtgtgagtgcaaaaaagaagcaaaaggacttcagtgttttt

SEQ ID NO: 4372 - RNA, 149 nt, synthetic construct
  source 1..149: mol_type = other RNA; note = pegRNA
ggtgtcacactgaagtccttgttttagagctagaaatagcaagttaaaataaggctagtccgttatcaacttgaaaaagtggcaccgagtcggtgctcactctgggcagtgtgagtgcaaaaaagaagcgaaaggacttcagtgtgaca

SEQ ID NO: 4373 - RNA, 149 nt, synthetic construct
  source 1..149: mol_type = other RNA; note = pegRNA
ggtgtcacactgaagtccttgttttagagctagaaatagcaagttaaaataaggctagtccgttatcaacttgaaaaagtggcaccgagtcggtgctcactctgggcagtgtgagtgcaaaaaagaagcgaaaggacttcagtgttttt

SEQ ID NO: 4374 - RNA, 149 nt, synthetic construct
  source 1..149: mol_type = other RNA; note = pegRNA
ggtgtcacactgaagtccttgttttagagctagaaatagcaagttaaaataaggctagtccgttatcaacttgaaaaagtggcaccgagtcggtgctcactctgggcagtgtgagtgcaaaaaagaagctaaaggacttcagtgtgaca

SEQ ID NO: 4375 - RNA, 149 nt, synthetic construct
  source 1..149: mol_type = other RNA; note = pegRNA
ggtgtcacactgaagtccttgttttagagctagaaatagcaagttaaaataaggctagtccgttatcaacttgaaaaagtggcaccgagtcggtgctcactctgggcagtgtgagtgcaaaaaagaagctaaaggacttcagtgttttt

SEQ ID NO: 4376 - RNA, 149 nt, synthetic construct
  source 1..149: mol_type = other RNA; note = pegRNA
ggtgtcacactgaagtccttgttttagagctagaaatagcaagttaaaataaggctagtccgttatcaacttgaaaaagtggcaccgagtcggtgctctgggcagtgtgagtgcaaaaaagaagcaaaaggacttcagtgtgacatttt

SEQ ID NO: 4377 - RNA, 149 nt, synthetic construct
  source 1..149: mol_type = other RNA; note = pegRNA
ggtgtcacactgaagtccttgttttagagctagaaatagcaagttaaaataaggctagtccgttatcaacttgaaaaagtggcaccgagtcggtgctctgggcagtgtgagtgcaaaaaagaagcgaaaggacttcagtgtgacatttt

SEQ ID NO: 4378 - RNA, 149 nt, synthetic construct
  source 1..149: mol_type = other RNA; note = pegRNA
ggtgtcacactgaagtccttgttttagagctagaaatagcaagttaaaataaggctagtccgttatcaacttgaaaaagtggcaccgagtcggtgctctgggcagtgtgagtgcaaaaaagaagctaaaggacttcagtgtgacatttt

SEQ ID NO: 4379 - RNA, 150 nt, synthetic construct
  source 1..150: mol_type = other RNA; note = pegRNA
ggtgtcacactgaagtccttgttttagagctagaaatagcaagttaaaataaggctagtccgttatcaacttgaaaaagtggcaccgagtcggtgcactctgggcagtgtgagtgcaaaaaagaagcaaaaggacttcagtgtgactttt

SEQ ID NO: 4380 - RNA, 150 nt, synthetic construct
  source 1..150: mol_type = other RNA; note = pegRNA
ggtgtcacactgaagtccttgttttagagctagaaatagcaagttaaaataaggctagtccgttatcaacttgaaaaagtggcaccgagtcggtgcactctgggcagtgtgagtgcaaaaaagaagcgaaaggacttcagtgtgactttt

SEQ ID NO: 4381 - RNA, 150 nt, synthetic construct
  source 1..150: mol_type = other RNA; note = pegRNA
ggtgtcacactgaagtccttgttttagagctagaaatagcaagttaaaataaggctagtccgttatcaacttgaaaaagtggcaccgagtcggtgcactctgggcagtgtgagtgcaaaaaagaagctaaaggacttcagtgtgactttt

SEQ ID NO: 4382 - RNA, 150 nt, synthetic construct
  source 1..150: mol_type = other RNA; note = pegRNA
ggtgtcacactgaagtccttgttttagagctagaaatagcaagttaaaataaggctagtccgttatcaacttgaaaaagtggcaccgagtcggtgccactctgggcagtgtgagtgcaaaaaagaagcaaaaggacttcagtgtgatttt

SEQ ID NO: 4383 - RNA, 150 nt, synthetic construct
  source 1..150: mol_type = other RNA; note = pegRNA
ggtgtcacactgaagtccttgttttagagctagaaatagcaagttaaaataaggctagtccgttatcaacttgaaaaagtggcaccgagtcggtgccactctgggcagtgtgagtgcaaaaaagaagcgaaaggacttcagtgtgatttt

SEQ ID NO: 4384 - RNA, 150 nt, synthetic construct
  source 1..150: mol_type = other RNA; note = pegRNA
ggtgtcacactgaagtccttgttttagagctagaaatagcaagttaaaataaggctagtccgttatcaacttgaaaaagtggcaccgagtcggtgccactctgggcagtgtgagtgcaaaaaagaagctaaaggacttcagtgtgatttt

SEQ ID NO: 4385 - RNA, 150 nt, synthetic construct
  source 1..150: mol_type = other RNA; note = pegRNA
ggtgtcacactgaagtccttgttttagagctagaaatagcaagttaaaataaggctagtccgttatcaacttgaaaaagtggcaccgagtcggtgccctcactctgggcagtgtgagtgcaaaaaagaagcaaaaggacttcagtgtgac

SEQ ID NO: 4386 - RNA, 150 nt, synthetic construct
  source 1..150: mol_type = other RNA; note = pegRNA
ggtgtcacactgaagtccttgttttagagctagaaatagcaagttaaaataaggctagtccgttatcaacttgaaaaagtggcaccgagtcggtgccctcactctgggcagtgtgagtgcaaaaaagaagcaaaaggacttcagtgtttt

SEQ ID NO: 4387 - RNA, 150 nt, synthetic construct
  source 1..150: mol_type = other RNA; note = pegRNA
ggtgtcacactgaagtccttgttttagagctagaaatagcaagttaaaataaggctagtccgttatcaacttgaaaaagtggcaccgagtcggtgccctcactctgggcagtgtgagtgcaaaaaagaagcgaaaggacttcagtgtgac

SEQ ID NO: 4388 - RNA, 150 nt, synthetic construct
  source 1..150: mol_type = other RNA; note = pegRNA
ggtgtcacactgaagtccttgttttagagctagaaatagcaagttaaaataaggctagtccgttatcaacttgaaaaagtggcaccgagtcggtgccctcactctgggcagtgtgagtgcaaaaaagaagcgaaaggacttcagtgtttt

SEQ ID NO: 4389 - RNA, 150 nt, synthetic construct
  source 1..150: mol_type = other RNA; note = pegRNA
ggtgtcacactgaagtccttgttttagagctagaaatagcaagttaaaataaggctagtccgttatcaacttgaaaaagtggcaccgagtcggtgccctcactctgggcagtgtgagtgcaaaaaagaagctaaaggacttcagtgtgac

SEQ ID NO: 4390 - RNA, 150 nt, synthetic construct
  source 1..150: mol_type = other RNA; note = pegRNA
ggtgtcacactgaagtccttgttttagagctagaaatagcaagttaaaataaggctagtccgttatcaacttgaaaaagtggcaccgagtcggtgccctcactctgggcagtgtgagtgcaaaaaagaagctaaaggacttcagtgtttt

SEQ ID NO: 4391 - RNA, 150 nt, synthetic construct
  source 1..150: mol_type = other RNA; note = pegRNA
ggtgtcacactgaagtccttgttttagagctagaaatagcaagttaaaataaggctagtccgttatcaacttgaaaaagtggcaccgagtcggtgcctcactctgggcagtgtgagtgcaaaaaagaagcaaaaggacttcagtgtgaca

SEQ ID NO: 4392 - RNA, 150 nt, synthetic construct
  source 1..150: mol_type = other RNA; note = pegRNA
ggtgtcacactgaagtccttgttttagagctagaaatagcaagttaaaataaggctagtccgttatcaacttgaaaaagtggcaccgagtcggtgcctcactctgggcagtgtgagtgcaaaaaagaagcaaaaggacttcagtgttttt

SEQ ID NO: 4393 - RNA, 150 nt, synthetic construct
  source 1..150: mol_type = other RNA; note = pegRNA
ggtgtcacactgaagtccttgttttagagctagaaatagcaagttaaaataaggctagtccgttatcaacttgaaaaagtggcaccgagtcggtgcctcactctgggcagtgtgagtgcaaaaaagaagcgaaaggacttcagtgtgaca

SEQ ID NO: 4394 - RNA, 150 nt, synthetic construct
  source 1..150: mol_type = other RNA; note = pegRNA
ggtgtcacactgaagtccttgttttagagctagaaatagcaagttaaaataaggctagtccgttatcaacttgaaaaagtggcaccgagtcggtgcctcactctgggcagtgtgagtgcaaaaaagaagcgaaaggacttcagtgttttt

SEQ ID NO: 4395 - RNA, 150 nt, synthetic construct
  source 1..150: mol_type = other RNA; note = pegRNA
ggtgtcacactgaagtccttgttttagagctagaaatagcaagttaaaataaggctagtccgttatcaacttgaaaaagtggcaccgagtcggtgcctcactctgggcagtgtgagtgcaaaaaagaagctaaaggacttcagtgtgaca

SEQ ID NO: 4396 - RNA, 150 nt, synthetic construct
  source 1..150: mol_type = other RNA; note = pegRNA
ggtgtcacactgaagtccttgttttagagctagaaatagcaagttaaaataaggctagtccgttatcaacttgaaaaagtggcaccgagtcggtgcctcactctgggcagtgtgagtgcaaaaaagaagctaaaggacttcagtgttttt

SEQ ID NO: 4397 - RNA, 150 nt, synthetic construct
  source 1..150: mol_type = other RNA; note = pegRNA
ggtgtcacactgaagtccttgttttagagctagaaatagcaagttaaaataaggctagtccgttatcaacttgaaaaagtggcaccgagtcggtgcctctgggcagtgtgagtgcaaaaaagaagcaaaaggacttcagtgtgacatttt

SEQ ID NO: 4398 - RNA, 150 nt, synthetic construct
  source 1..150: mol_type = other RNA; note = pegRNA
ggtgtcacactgaagtccttgttttagagctagaaatagcaagttaaaataaggctagtccgttatcaacttgaaaaagtggcaccgagtcggtgcctctgggcagtgtgagtgcaaaaaagaagcgaaaggacttcagtgtgacatttt

SEQ ID NO: 4399 - RNA, 150 nt, synthetic construct
  source 1..150: mol_type = other RNA; note = pegRNA
ggtgtcacactgaagtccttgttttagagctagaaatagcaagttaaaataaggctagtccgttatcaacttgaaaaagtggcaccgagtcggtgcctctgggcagtgtgagtgcaaaaaagaagctaaaggacttcagtgtgacatttt

SEQ ID NO: 4400 - RNA, 150 nt, synthetic construct
  source 1..150: mol_type = other RNA; note = pegRNA
ggtgtcacactgaagtccttgttttagagctagaaatagcaagttaaaataaggctagtccgttatcaacttgaaaaagtggcaccgagtcggtgctcactctgggcagtgtgagtgcaaaaaagaagcaaaaggacttcagtgtgacac

SEQ ID NO: 4401 - RNA, 150 nt, synthetic construct
  source 1..150: mol_type = other RNA; note = pegRNA
ggtgtcacactgaagtccttgttttagagctagaaatagcaagttaaaataaggctagtccgttatcaacttgaaaaagtggcaccgagtcggtgctcactctgggcagtgtgagtgcaaaaaagaagcaaaaggacttcagtgtgtttt

SEQ ID NO: 4402 - RNA, 150 nt, synthetic construct
  source 1..150: mol_type = other RNA; note = pegRNA
ggtgtcacactgaagtccttgttttagagctagaaatagcaagttaaaataaggctagtccgttatcaacttgaaaaagtggcaccgagtcggtgctcactctgggcagtgtgagtgcaaaaaagaagcgaaaggacttcagtgtgacac

SEQ ID NO: 4403 - RNA, 150 nt, synthetic construct
  source 1..150: mol_type = other RNA; note = pegRNA
ggtgtcacactgaagtccttgttttagagctagaaatagcaagttaaaataaggctagtccgttatcaacttgaaaaagtggcaccgagtcggtgctcactctgggcagtgtgagtgcaaaaaagaagcgaaaggacttcagtgtgtttt

SEQ ID NO: 4404 - RNA, 150 nt, synthetic construct
  source 1..150: mol_type = other RNA; note = pegRNA
ggtgtcacactgaagtccttgttttagagctagaaatagcaagttaaaataaggctagtccgttatcaacttgaaaaagtggcaccgagtcggtgctcactctgggcagtgtgagtgcaaaaaagaagctaaaggacttcagtgtgacac

SEQ ID NO: 4405 - RNA, 150 nt, synthetic construct
  source 1..150: mol_type = other RNA; note = pegRNA
ggtgtcacactgaagtccttgttttagagctagaaatagcaagttaaaataaggctagtccgttatcaacttgaaaaagtggcaccgagtcggtgctcactctgggcagtgtgagtgcaaaaaagaagctaaaggacttcagtgtgtttt

SEQ ID NO: 4406 - RNA, 150 nt, synthetic construct
  source 1..150: mol_type = other RNA; note = pegRNA
ggtgtcacactgaagtccttgttttagagctagaaatagcaagttaaaataaggctagtccgttatcaacttgaaaaagtggcaccgagtcggtgctctgggcagtgtgagtgcaaaaaagaagcaaaaggacttcagtgtgacactttt

SEQ ID NO: 4407 - RNA, 150 nt, synthetic construct
  source 1..150: mol_type = other RNA; note = pegRNA
ggtgtcacactgaagtccttgttttagagctagaaatagcaagttaaaataaggctagtccgttatcaacttgaaaaagtggcaccgagtcggtgctctgggcagtgtgagtgcaaaaaagaagcgaaaggacttcagtgtgacactttt

SEQ ID NO: 4408 - RNA, 150 nt, synthetic construct
  source 1..150: mol_type = other RNA; note = pegRNA
ggtgtcacactgaagtccttgttttagagctagaaatagcaagttaaaataaggctagtccgttatcaacttgaaaaagtggcaccgagtcggtgctctgggcagtgtgagtgcaaaaaagaagctaaaggacttcagtgtgacactttt

SEQ ID NO: 4409 - RNA, 151 nt, synthetic construct
  source 1..151: mol_type = other RNA; note = pegRNA
ggtgtcacactgaagtccttgttttagagctagaaatagcaagttaaaataaggctagtccgttatcaacttgaaaaagtggcaccgagtcggtgcactctgggcagtgtgagtgcaaaaaagaagcaaaaggacttcagtgtgacatttt

SEQ ID NO: 4410 - RNA, 151 nt, synthetic construct
  source 1..151: mol_type = other RNA; note = pegRNA
ggtgtcacactgaagtccttgttttagagctagaaatagcaagttaaaataaggctagtccgttatcaacttgaaaaagtggcaccgagtcggtgcactctgggcagtgtgagtgcaaaaaagaagcgaaaggacttcagtgtgacatttt

SEQ ID NO: 4411 - RNA, 151 nt, synthetic construct
  source 1..151: mol_type = other RNA; note = pegRNA
ggtgtcacactgaagtccttgttttagagctagaaatagcaagttaaaataaggctagtccgttatcaacttgaaaaagtggcaccgagtcggtgcactctgggcagtgtgagtgcaaaaaagaagctaaaggacttcagtgtgacatttt

SEQ ID NO: 4412 - RNA, 151 nt, synthetic construct
  source 1..151: mol_type = other RNA; note = pegRNA
ggtgtcacactgaagtccttgttttagagctagaaatagcaagttaaaataaggctagtccgttatcaacttgaaaaagtggcaccgagtcggtgccactctgggcagtgtgagtgcaaaaaagaagcaaaaggacttcagtgtgactttt

SEQ ID NO: 4413 - RNA, 151 nt, synthetic construct
  source 1..151: mol_type = other RNA; note = pegRNA
ggtgtcacactgaagtccttgttttagagctagaaatagcaagttaaaataaggctagtccgttatcaacttgaaaaagtggcaccgagtcggtgccactctgggcagtgtgagtgcaaaaaagaagcgaaaggacttcagtgtgactttt

SEQ ID NO: 4414 - RNA, 151 nt, synthetic construct
  source 1..151: mol_type = other RNA; note = pegRNA
ggtgtcacactgaagtccttgttttagagctagaaatagcaagttaaaataaggctagtccgttatcaacttgaaaaagtggcaccgagtcggtgccactctgggcagtgtgagtgcaaaaaagaagctaaaggacttcagtgtgactttt

SEQ ID NO: 4415 - RNA, 151 nt, synthetic construct
  source 1..151: mol_type = other RNA; note = pegRNA
ggtgtcacactgaagtccttgttttagagctagaaatagcaagttaaaataaggctagtccgttatcaacttgaaaaagtggcaccgagtcggtgccctcactctgggcagtgtgagtgcaaaaaagaagcaaaaggacttcagtgtgaca

SEQ ID NO: 4416 - RNA, 151 nt, synthetic construct
  source 1..151: mol_type = other RNA; note = pegRNA
ggtgtcacactgaagtccttgttttagagctagaaatagcaagttaaaataaggctagtccgttatcaacttgaaaaagtggcaccgagtcggtgccctcactctgggcagtgtgagtgcaaaaaagaagcaaaaggacttcagtgttttt

SEQ ID NO: 4417 - RNA, 151 nt, synthetic construct
  source 1..151: mol_type = other RNA; note = pegRNA
ggtgtcacactgaagtccttgttttagagctagaaatagcaagttaaaataaggctagtccgttatcaacttgaaaaagtggcaccgagtcggtgccctcactctgggcagtgtgagtgcaaaaaagaagcgaaaggacttcagtgtgaca

SEQ ID NO: 4418 - RNA, 151 nt, synthetic construct
  source 1..151: mol_type = other RNA; note = pegRNA
ggtgtcacactgaagtccttgttttagagctagaaatagcaagttaaaataaggctagtccgttatcaacttgaaaaagtggcaccgagtcggtgccctcactctgggcagtgtgagtgcaaaaaagaagcgaaaggacttcagtgttttt

SEQ ID NO: 4419 - RNA, 151 nt, synthetic construct
  source 1..151: mol_type = other RNA; note = pegRNA
ggtgtcacactgaagtccttgttttagagctagaaatagcaagttaaaataaggctagtccgttatcaacttgaaaaagtggcaccgagtcggtgccctcactctgggcagtgtgagtgcaaaaaagaagctaaaggacttcagtgtgaca

SEQ ID NO: 4420 - RNA, 151 nt, synthetic construct
  source 1..151: mol_type = other RNA; note = pegRNA
ggtgtcacactgaagtccttgttttagagctagaaatagcaagttaaaataaggctagtccgttatcaacttgaaaaagtggcaccgagtcggtgccctcactctgggcagtgtgagtgcaaaaaagaagctaaaggacttcagtgttttt

SEQ ID NO: 4421 - RNA, 151 nt, synthetic construct
  source 1..151: mol_type = other RNA; note = pegRNA
ggtgtcacactgaagtccttgttttagagctagaaatagcaagttaaaataaggctagtccgttatcaacttgaaaaagtggcaccgagtcggtgcctcactctgggcagtgtgagtgcaaaaaagaagcaaaaggacttcagtgtgacac

SEQ ID NO: 4422 - RNA, 151 nt, synthetic construct
  source 1..151: mol_type = other RNA; note = pegRNA
ggtgtcacactgaagtccttgttttagagctagaaatagcaagttaaaataaggctagtccgttatcaacttgaaaaagtggcaccgagtcggtgcctcactctgggcagtgtgagtgcaaaaaagaagcaaaaggacttcagtgtgtttt

SEQ ID NO: 4423 - RNA, 151 nt, synthetic construct
  source 1..151: mol_type = other RNA; note = pegRNA
ggtgtcacactgaagtccttgttttagagctagaaatagcaagttaaaataaggctagtccgttatcaacttgaaaaagtggcaccgagtcggtgcctcactctgggcagtgtgagtgcaaaaaagaagcgaaaggacttcagtgtgacac

SEQ ID NO: 4424 - RNA, 151 nt, synthetic construct
  source 1..151: mol_type = other RNA; note = pegRNA
ggtgtcacactgaagtccttgttttagagctagaaatagcaagttaaaataaggctagtccgttatcaacttgaaaaagtggcaccgagtcggtgcctcactctgggcagtgtgagtgcaaaaaagaagcgaaaggacttcagtgtgtttt

SEQ ID NO: 4425 - RNA, 151 nt, synthetic construct
  source 1..151: mol_type = other RNA; note = pegRNA
ggtgtcacactgaagtccttgttttagagctagaaatagcaagttaaaataaggctagtccgttatcaacttgaaaaagtggcaccgagtcggtgcctcactctgggcagtgtgagtgcaaaaaagaagctaaaggacttcagtgtgacac

SEQ ID NO: 4426 - RNA, 151 nt, synthetic construct
  source 1..151: mol_type = other RNA; note = pegRNA
ggtgtcacactgaagtccttgttttagagctagaaatagcaagttaaaataaggctagtccgttatcaacttgaaaaagtggcaccgagtcggtgcctcactctgggcagtgtgagtgcaaaaaagaagctaaaggacttcagtgtgtttt

SEQ ID NO: 4427 - RNA, 151 nt, synthetic construct
  source 1..151: mol_type = other RNA; note = pegRNA
ggtgtcacactgaagtccttgttttagagctagaaatagcaagttaaaataaggctagtccgttatcaacttgaaaaagtggcaccgagtcggtgcctctgggcagtgtgagtgcaaaaaagaagcaaaaggacttcagtgtgacactttt

SEQ ID NO: 4428 - RNA, 151 nt, synthetic construct
  source 1..151: mol_type = other RNA; note = pegRNA
ggtgtcacactgaagtccttgttttagagctagaaatagcaagttaaaataaggctagtccgttatcaacttgaaaaagtggcaccgagtcggtgcctctgggcagtgtgagtgcaaaaaagaagcgaaaggacttcagtgtgacactttt

SEQ ID NO: 4429 - RNA, 151 nt, synthetic construct
  source 1..151: mol_type = other RNA; note = pegRNA
ggtgtcacactgaagtccttgttttagagctagaaatagcaagttaaaataaggctagtccgttatcaacttgaaaaagtggcaccgagtcggtgcctctgggcagtgtgagtgcaaaaaagaagctaaaggacttcagtgtgacactttt

SEQ ID NO: 4430 - RNA, 151 nt, synthetic construct
  source 1..151: mol_type = other RNA; note = pegRNA
ggtgtcacactgaagtccttgttttagagctagaaatagcaagttaaaataaggctagtccgttatcaacttgaaaaagtggcaccgagtcggtgctcactctgggcagtgtgagtgcaaaaaagaagcaaaaggacttcagtgtgatttt

SEQ ID NO: 4431 - RNA, 151 nt, synthetic construct
  source 1..151: mol_type = other RNA; note = pegRNA
ggtgtcacactgaagtccttgttttagagctagaaatagcaagttaaaataaggctagtccgttatcaacttgaaaaagtggcaccgagtcggtgctcactctgggcagtgtgagtgcaaaaaagaagcgaaaggacttcagtgtgatttt

SEQ ID NO: 4432 - RNA, 151 nt, synthetic construct
  source 1..151: mol_type = other RNA; note = pegRNA
ggtgtcacactgaagtccttgttttagagctagaaatagcaagttaaaataaggctagtccgttatcaacttgaaaaagtggcaccgagtcggtgctcactctgggcagtgtgagtgcaaaaaagaagctaaaggacttcagtgtgatttt

SEQ ID NO: 4433 - RNA, 152 nt, synthetic construct
  source 1..152: mol_type = other RNA; note = pegRNA
ggtgtcacactgaagtccttgttttagagctagaaatagcaagttaaaataaggctagtccgttatcaacttgaaaaagtggcaccgagtcggtgcactctgggcagtgtgagtgcaaaaaagaagcaaaaggacttcagtgtgacactttt

SEQ ID NO: 4434 - RNA, 152 nt, synthetic construct
  source 1..152: mol_type = other RNA; note = pegRNA
ggtgtcacactgaagtccttgttttagagctagaaatagcaagttaaaataaggctagtccgttatcaacttgaaaaagtggcaccgagtcggtgcactctgggcagtgtgagtgcaaaaaagaagcgaaaggacttcagtgtgacactttt

SEQ ID NO: 4435 - RNA, 152 nt, synthetic construct
  source 1..152: mol_type = other RNA; note = pegRNA
ggtgtcacactgaagtccttgttttagagctagaaatagcaagttaaaataaggctagtccgttatcaacttgaaaaagtggcaccgagtcggtgcactctgggcagtgtgagtgcaaaaaagaagctaaaggacttcagtgtgacactttt

SEQ ID NO: 4436 - RNA, 152 nt, synthetic construct
  source 1..152: mol_type = other RNA; note = pegRNA
ggtgtcacactgaagtccttgttttagagctagaaatagcaagttaaaataaggctagtccgttatcaacttgaaaaagtggcaccgagtcggtgccactctgggcagtgtgagtgcaaaaaagaagcaaaaggacttcagtgtgacatttt

SEQ ID NO: 4437 - RNA, 152 nt, synthetic construct
  source 1..152: mol_type = other RNA; note = pegRNA
ggtgtcacactgaagtccttgttttagagctagaaatagcaagttaaaataaggctagtccgttatcaacttgaaaaagtggcaccgagtcggtgccactctgggcagtgtgagtgcaaaaaagaagcgaaaggacttcagtgtgacatttt

SEQ ID NO: 4438 - RNA, 152 nt, synthetic construct
  source 1..152: mol_type = other RNA; note = pegRNA
ggtgtcacactgaagtccttgttttagagctagaaatagcaagttaaaataaggctagtccgttatcaacttgaaaaagtggcaccgagtcggtgccactctgggcagtgtgagtgcaaaaaagaagctaaaggacttcagtgtgacatttt

SEQ ID NO: 4439 - RNA, 152 nt, synthetic construct
  source 1..152: mol_type = other RNA; note = pegRNA
ggtgtcacactgaagtccttgttttagagctagaaatagcaagttaaaataaggctagtccgttatcaacttgaaaaagtggcaccgagtcggtgccctcactctgggcagtgtgagtgcaaaaaagaagcaaaaggacttcagtgtgacac

SEQ ID NO: 4440 - RNA, 152 nt, synthetic construct
  source 1..152: mol_type = other RNA; note = pegRNA
ggtgtcacactgaagtccttgttttagagctagaaatagcaagttaaaataaggctagtccgttatcaacttgaaaaagtggcaccgagtcggtgccctcactctgggcagtgtgagtgcaaaaaagaagcaaaaggacttcagtgtgtttt

SEQ ID NO: 4441 - RNA, 152 nt, synthetic construct
  source 1..152: mol_type = other RNA; note = pegRNA
ggtgtcacactgaagtccttgttttagagctagaaatagcaagttaaaataaggctagtccgttatcaacttgaaaaagtggcaccgagtcggtgccctcactctgggcagtgtgagtgcaaaaaagaagcgaaaggacttcagtgtgacac

SEQ ID NO: 4442 - RNA, 152 nt, synthetic construct
  source 1..152: mol_type = other RNA; note = pegRNA
ggtgtcacactgaagtccttgttttagagctagaaatagcaagttaaaataaggctagtccgttatcaacttgaaaaagtggcaccgagtcggtgccctcactctgggcagtgtgagtgcaaaaaagaagcgaaaggacttcagtgtgtttt

SEQ ID NO: 4443 - RNA, 152 nt, synthetic construct
  source 1..152: mol_type = other RNA; note = pegRNA
ggtgtcacactgaagtccttgttttagagctagaaatagcaagttaaaataaggctagtccgttatcaacttgaaaaagtggcaccgagtcggtgccctcactctgggcagtgtgagtgcaaaaaagaagctaaaggacttcagtgtgacac

SEQ ID NO: 4444 - RNA, 152 nt, synthetic construct
  source 1..152: mol_type = other RNA; note = pegRNA
ggtgtcacactgaagtccttgttttagagctagaaatagcaagttaaaataaggctagtccgttatcaacttgaaaaagtggcaccgagtcggtgccctcactctgggcagtgtgagtgcaaaaaagaagctaaaggacttcagtgtgtttt

SEQ ID NO: 4445 - RNA, 152 nt, synthetic construct
  source 1..152: mol_type = other RNA; note = pegRNA
ggtgtcacactgaagtccttgttttagagctagaaatagcaagttaaaataaggctagtccgttatcaacttgaaaaagtggcaccgagtcggtgcctcactctgggcagtgtgagtgcaaaaaagaagcaaaaggacttcagtgtgatttt

SEQ ID NO: 4446 - RNA, 152 nt, synthetic construct
  source 1..152: mol_type = other RNA; note = pegRNA
ggtgtcacactgaagtccttgttttagagctagaaatagcaagttaaaataaggctagtccgttatcaacttgaaaaagtggcaccgagtcggtgcctcactctgggcagtgtgagtgcaaaaaagaagcgaaaggacttcagtgtgatttt

SEQ ID NO: 4447 - RNA, 152 nt, synthetic construct
  source 1..152: mol_type = other RNA; note = pegRNA
ggtgtcacactgaagtccttgttttagagctagaaatagcaagttaaaataaggctagtccgttatcaacttgaaaaagtggcaccgagtcggtgcctcactctgggcagtgtgagtgcaaaaaagaagctaaaggacttcagtgtgatttt

SEQ ID NO: 4448 - RNA, 152 nt, synthetic construct
  source 1..152: mol_type = other RNA; note = pegRNA
ggtgtcacactgaagtccttgttttagagctagaaatagcaagttaaaataaggctagtccgttatcaacttgaaaaagtggcaccgagtcggtgctcactctgggcagtgtgagtgcaaaaaagaagcaaaaggacttcagtgtgactttt

SEQ ID NO: 4449 - RNA, 152 nt, synthetic construct
  source 1..152: mol_type = other RNA; note = pegRNA
ggtgtcacactgaagtccttgttttagagctagaaatagcaagttaaaataaggctagtccgttatcaacttgaaaaagtggcaccgagtcggtgctcactctgggcagtgtgagtgcaaaaaagaagcgaaaggacttcagtgtgactttt

SEQ ID NO: 4450 - RNA, 152 nt, synthetic construct
  source 1..152: mol_type = other RNA; note = pegRNA
ggtgtcacactgaagtccttgttttagagctagaaatagcaagttaaaataaggctagtccgttatcaacttgaaaaagtggcaccgagtcggtgctcactctgggcagtgtgagtgcaaaaaagaagctaaaggacttcagtgtgactttt

SEQ ID NO: 4451 - RNA, 153 nt, synthetic construct
  source 1..153: mol_type = other RNA; note = pegRNA
ggtgtcacactgaagtccttgttttagagctagaaatagcaagttaaaataaggctagtccgttatcaacttgaaaaagtggcaccgagtcggtgccactctgggcagtgtgagtgcaaaaaagaagcaaaaggacttcagtgtgacactttt

SEQ ID NO: 4452 - RNA, 153 nt, synthetic construct
  source 1..153: mol_type = other RNA; note = pegRNA
ggtgtcacactgaagtccttgttttagagctagaaatagcaagttaaaataaggctagtccgttatcaacttgaaaaagtggcaccgagtcggtgccactctgggcagtgtgagtgcaaaaaagaagcgaaaggacttcagtgtgacactttt

SEQ ID NO: 4453 - RNA, 153 nt, synthetic construct
  source 1..153: mol_type = other RNA; note = pegRNA
ggtgtcacactgaagtccttgttttagagctagaaatagcaagttaaaataaggctagtccgttatcaacttgaaaaagtggcaccgagtcggtgccactctgggcagtgtgagtgcaaaaaagaagctaaaggacttcagtgtgacactttt

SEQ ID NO: 4454 - RNA, 153 nt, synthetic construct
  source 1..153: mol_type = other RNA; note = pegRNA
ggtgtcacactgaagtccttgttttagagctagaaatagcaagttaaaataaggctagtccgttatcaacttgaaaaagtggcaccgagtcggtgccctcactctgggcagtgtgagtgcaaaaaagaagcaaaaggacttcagtgtgatttt

SEQ ID NO: 4455 - RNA, 153 nt, synthetic construct
  source 1..153: mol_type = other RNA; note = pegRNA
ggtgtcacactgaagtccttgttttagagctagaaatagcaagttaaaataaggctagtccgttatcaacttgaaaaagtggcaccgagtcggtgccctcactctgggcagtgtgagtgcaaaaaagaagcgaaaggacttcagtgtgatttt

SEQ ID NO: 4456 - RNA, 153 nt, synthetic construct
  source 1..153: mol_type = other RNA; note = pegRNA
ggtgtcacactgaagtccttgttttagagctagaaatagcaagttaaaataaggctagtccgttatcaacttgaaaaagtggcaccgagtcggtgccctcactctgggcagtgtgagtgcaaaaaagaagctaaaggacttcagtgtgatttt

SEQ ID NO: 4457 - RNA, 153 nt, synthetic construct
  source 1..153: mol_type = other RNA; note = pegRNA
ggtgtcacactgaagtccttgttttagagctagaaatagcaagttaaaataaggctagtccgttatcaacttgaaaaagtggcaccgagtcggtgcctcactctgggcagtgtgagtgcaaaaaagaagcaaaaggacttcagtgtgactttt

SEQ ID NO: 4458 - RNA, 153 nt, synthetic construct
  source 1..153: mol_type = other RNA; note = pegRNA
ggtgtcacactgaagtccttgttttagagctagaaatagcaagttaaaataaggctagtccgttatcaacttgaaaaagtggcaccgagtcggtgcctcactctgggcagtgtgagtgcaaaaaagaagcgaaaggacttcagtgtgactttt

SEQ ID NO: 4459 - RNA, 153 nt, synthetic construct
  source 1..153: mol_type = other RNA; note = pegRNA
ggtgtcacactgaagtccttgttttagagctagaaatagcaagttaaaataaggctagtccgttatcaacttgaaaaagtggcaccgagtcggtgcctcactctgggcagtgtgagtgcaaaaaagaagctaaaggacttcagtgtgactttt

SEQ ID NO: 4460 - RNA, 153 nt, synthetic construct
  source 1..153: mol_type = other RNA; note = pegRNA
ggtgtcacactgaagtccttgttttagagctagaaatagcaagttaaaataaggctagtccgttatcaacttgaaaaagtggcaccgagtcggtgctcactctgggcagtgtgagtgcaaaaaagaagcaaaaggacttcagtgtgacatttt

SEQ ID NO: 4461 - RNA, 153 nt, synthetic construct
  source 1..153: mol_type = other RNA; note = pegRNA
ggtgtcacactgaagtccttgttttagagctagaaatagcaagttaaaataaggctagtccgttatcaacttgaaaaagtggcaccgagtcggtgctcactctgggcagtgtgagtgcaaaaaagaagcgaaaggacttcagtgtgacatttt

SEQ ID NO: 4462 - RNA, 153 nt, synthetic construct
  source 1..153: mol_type = other RNA; note = pegRNA
ggtgtcacactgaagtccttgttttagagctagaaatagcaagttaaaataaggctagtccgttatcaacttgaaaaagtggcaccgagtcggtgctcactctgggcagtgtgagtgcaaaaaagaagctaaaggacttcagtgtgacatttt

SEQ ID NO: 4463 - RNA, 154 nt, synthetic construct
  source 1..154: mol_type = other RNA; note = pegRNA
ggtgtcacactgaagtccttgttttagagctagaaatagcaagttaaaataaggctagtccgttatcaacttgaaaaagtggcaccgagtcggtgccctcactctgggcagtgtgagtgcaaaaaagaagcaaaaggacttcagtgtgactttt

SEQ ID NO: 4464 - RNA, 154 nt, synthetic construct
  source 1..154: mol_type = other RNA; note = pegRNA
ggtgtcacactgaagtccttgttttagagctagaaatagcaagttaaaataaggctagtccgttatcaacttgaaaaagtggcaccgagtcggtgccctcactctgggcagtgtgagtgcaaaaaagaagcgaaaggacttcagtgtgactttt

SEQ ID NO: 4465 - RNA, 154 nt, synthetic construct
  source 1..154: mol_type = other RNA; note = pegRNA
ggtgtcacactgaagtccttgttttagagctagaaatagcaagttaaaataaggctagtccgttatcaacttgaaaaagtggcaccgagtcggtgccctcactctgggcagtgtgagtgcaaaaaagaagctaaaggacttcagtgtgactttt

SEQ ID NO: 4466 - RNA, 154 nt, synthetic construct
  source 1..154: mol_type = other RNA; note = pegRNA
ggtgtcacactgaagtccttgttttagagctagaaatagcaagttaaaataaggctagtccgttatcaacttgaaaaagtggcaccgagtcggtgcctcactctgggcagtgtgagtgcaaaaaagaagcaaaaggacttcagtgtgacatttt

SEQ ID NO: 4467 - RNA, 154 nt, synthetic construct
  source 1..154: mol_type = other RNA; note = pegRNA
ggtgtcacactgaagtccttgttttagagctagaaatagcaagttaaaataaggctagtccgttatcaacttgaaaaagtggcaccgagtcggtgcctcactctgggcagtgtgagtgcaaaaaagaagcgaaaggacttcagtgtgacatttt

SEQ ID NO: 4468 - RNA, 154 nt, synthetic construct
  source 1..154: mol_type = other RNA; note = pegRNA
ggtgtcacactgaagtccttgttttagagctagaaatagcaagttaaaataaggctagtccgttatcaacttgaaaaagtggcaccgagtcggtgcctcactctgggcagtgtgagtgcaaaaaagaagctaaaggacttcagtgtgacatttt

SEQ ID NO: 4469 - RNA, 154 nt, synthetic construct
  source 1..154: mol_type = other RNA; note = pegRNA
ggtgtcacactgaagtccttgttttagagctagaaatagcaagttaaaataaggctagtccgttatcaacttgaaaaagtggcaccgagtcggtgctcactctgggcagtgtgagtgcaaaaaagaagcaaaaggacttcagtgtgacactttt

SEQ ID NO: 4470 - RNA, 154 nt, synthetic construct
  source 1..154: mol_type = other RNA; note = pegRNA
ggtgtcacactgaagtccttgttttagagctagaaatagcaagttaaaataaggctagtccgttatcaacttgaaaaagtggcaccgagtcggtgctcactctgggcagtgtgagtgcaaaaaagaagcgaaaggacttcagtgtgacactttt

SEQ ID NO: 4471 - RNA, 154 nt, synthetic construct
  source 1..154: mol_type = other RNA; note = pegRNA
ggtgtcacactgaagtccttgttttagagctagaaatagcaagttaaaataaggctagtccgttatcaacttgaaaaagtggcaccgagtcggtgctcactctgggcagtgtgagtgcaaaaaagaagctaaaggacttcagtgtgacactttt

SEQ ID NO: 4472 - RNA, 155 nt, synthetic construct
  source 1..155: mol_type = other RNA; note = pegRNA
ggtgtcacactgaagtccttgttttagagctagaaatagcaagttaaaataaggctagtccgttatcaacttgaaaaagtggcaccgagtcggtgccctcactctgggcagtgtgagtgcaaaaaagaagcaaaaggacttcagtgtgacatttt

SEQ ID NO: 4473 - RNA, 155 nt, synthetic construct
  source 1..155: mol_type = other RNA; note = pegRNA
ggtgtcacactgaagtccttgttttagagctagaaatagcaagttaaaataaggctagtccgttatcaacttgaaaaagtggcaccgagtcggtgccctcactctgggcagtgtgagtgcaaaaaagaagcgaaaggacttcagtgtgacatttt

SEQ ID NO: 4474 - RNA, 155 nt, synthetic construct
  source 1..155: mol_type = other RNA; note = pegRNA
ggtgtcacactgaagtccttgttttagagctagaaatagcaagttaaaataaggctagtccgttatcaacttgaaaaagtggcaccgagtcggtgccctcactctgggcagtgtgagtgcaaaaaagaagctaaaggacttcagtgtgacatttt

SEQ ID NO: 4475 - RNA, 155 nt, synthetic construct
  source 1..155: mol_type = other RNA; note = pegRNA
ggtgtcacactgaagtccttgttttagagctagaaatagcaagttaaaataaggctagtccgttatcaacttgaaaaagtggcaccgagtcggtgcctcactctgggcagtgtgagtgcaaaaaagaagcaaaaggacttcagtgtgacactttt

SEQ ID NO: 4476 - RNA, 155 nt, synthetic construct
  source 1..155: mol_type = other RNA; note = pegRNA
ggtgtcacactgaagtccttgttttagagctagaaatagcaagttaaaataaggctagtccgttatcaacttgaaaaagtggcaccgagtcggtgcctcactctgggcagtgtgagtgcaaaaaagaagcgaaaggacttcagtgtgacactttt

SEQ ID NO: 4477 - RNA, 155 nt, synthetic construct
  source 1..155: mol_type = other RNA; note = pegRNA
ggtgtcacactgaagtccttgttttagagctagaaatagcaagttaaaataaggctagtccgttatcaacttgaaaaagtggcaccgagtcggtgcctcactctgggcagtgtgagtgcaaaaaagaagctaaaggacttcagtgtgacactttt

SEQ ID NO: 4478 - RNA, 156 nt, synthetic construct
  source 1..156: mol_type = other RNA; note = pegRNA
ggtgtcacactgaagtccttgttttagagctagaaatagcaagttaaaataaggctagtccgttatcaacttgaaaaagtggcaccgagtcggtgccctcactctgggcagtgtgagtgcaaaaaagaagcaaaaggacttcagtgtgacactttt

SEQ ID NO: 4479 - RNA, 156 nt, synthetic construct
  source 1..156: mol_type = other RNA; note = pegRNA
ggtgtcacactgaagtccttgttttagagctagaaatagcaagttaaaataaggctagtccgttatcaacttgaaaaagtggcaccgagtcggtgccctcactctgggcagtgtgagtgcaaaaaagaagcgaaaggacttcagtgtgacactttt

SEQ ID NO: 4480 - RNA, 156 nt, synthetic construct
  source 1..156: mol_type = other RNA; note = pegRNA
ggtgtcacactgaagtccttgttttagagctagaaatagcaagttaaaataaggctagtccgttatcaacttgaaaaagtggcaccgagtcggtgccctcactctgggcagtgtgagtgcaaaaaagaagctaaaggacttcagtgtgacactttt

SEQ ID NO: 4481-4485 - skipped (5 entries)

SEQ ID NO: 4486 - RNA, 10 nt, synthetic construct
  source 1..10: mol_type = other RNA; note = PBS
agggctcaca

SEQ ID NO: 4487 - RNA, 11 nt, synthetic construct
  source 1..11: mol_type = other RNA; note = PBS
agggctcacat

SEQ ID NO: 4488 - RNA, 12 nt, synthetic construct
  source 1..12: mol_type = other RNA; note = PBS
agggctcacatc

SEQ ID NO: 4489 - RNA, 13 nt, synthetic construct
  source 1..13: mol_type = other RNA; note = PBS
agggctcacatcc

SEQ ID NO: 4490 - RNA, 14 nt, synthetic construct
  source 1..14: mol_type = other RNA; note = PBS
agggctcacatcca

SEQ ID NO: 4491 - RNA, 15 nt, synthetic construct
  source 1..15: mol_type = other RNA; note = PBS
agggctcacatccaa

SEQ ID NO: 4492 - RNA, 16 nt, synthetic construct
  source 1..16: mol_type = other RNA; note = PBS
agggctcacatccaac

SEQ ID NO: 4493 - RNA, 17 nt, synthetic construct
  source 1..17: mol_type = other RNA; note = PBS
agggctcacatccaaca

SEQ ID NO: 4494 - RNA, 18 nt, synthetic construct
  source 1..18: mol_type = other RNA; note = PBS
agggctcacatccaacat

SEQ ID NO: 4495 - RNA, 19 nt, synthetic construct
  source 1..19: mol_type = other RNA; note = PBS
agggctcacatccaacatc

SEQ ID NO: 4496 - RNA, 17 nt, synthetic construct
  source 1..17: mol_type = other RNA; note = PEgRNA spacer (AG PAM)
tggatgtgagccctgcc

SEQ ID NO: 4497 - RNA, 18 nt, synthetic construct
  source 1..18: mol_type = other RNA; note = PEgRNA spacer (AG PAM)
ttggatgtgagccctgcc

SEQ ID NO: 4498 - RNA, 19 nt, synthetic construct
  source 1..19: mol_type = other RNA; note = PEgRNA spacer (AG PAM)
gttggatgtgagccctgcc

SEQ ID NO: 4499 - RNA, 21 nt, synthetic construct
  source 1..21: mol_type = other RNA; note = PEgRNA spacer (AG PAM)
atgttggatgtgagccctgcc

SEQ ID NO: 4500 - RNA, 22 nt, synthetic construct
  source 1..22: mol_type = other RNA; note = PEgRNA spacer (AG PAM)
gatgttggatgtgagccctgcc

SEQ ID NO: 4501 - RNA, 38 nt, synthetic construct
  source 1..38: mol_type = other RNA; note = RTT
gcagaatttgttcactgagccatggaggttacactggc

SEQ ID NO: 4502 - RNA, 39 nt, synthetic construct
  source 1..39: mol_type = other RNA; note = RTT
tgcagaatttgttcactgagccatggaggttacactggc

SEQ ID NO: 4503 - RNA, 40 nt, synthetic construct
  source 1..40: mol_type = other RNA; note = RTT
ttgcagaatttgttcactgagccatggaggttacactggc

SEQ ID NO: 4504 - RNA, 96 nt, synthetic construct
  source 1..96: mol_type = other RNA; note = ngRNA
cactcacactgcccagagtggttttagagctagaaatagcaagttaaaataaggctagtccgttatcaacttgaaaaagtggcaccgagtcggtgc

SEQ ID NO: 4505 - RNA, 96 nt, synthetic construct
  source 1..96: mol_type = other RNA; note = ngRNA
ggtgtcacactgaagtccttgttttagagctagaaatagcaagttaaaataaggctagtccgttatcaacttgaaaaagtggcaccgagtcggtgc

SEQ ID NO: 4506 - RNA, 100 nt, synthetic construct
  source 1..100: mol_type = other RNA; note = ngRNA
cactcacactgcccagagtggttttagagctagaaatagcaagttaaaataaggctagtccgttatcaacttgaaaaagtggcaccgagtcggtgctttt

SEQ ID NO: 4507 - RNA, 100 nt, synthetic construct
  source 1..100: mol_type = other RNA; note = ngRNA
ggtgtcacactgaagtccttgttttagagctagaaatagcaagttaaaataaggctagtccgttatcaacttgaaaaagtggcaccgagtcggtgctttt

SEQ ID NO: 4508 - RNA, 20 nt, synthetic construct
  source 1..20: mol_type = other RNA; note = PE3 ngRNA spacer (TG PAM)
agaatttgttcactgagcca

SEQ ID NO: 4509 - RNA, 20 nt, synthetic construct
  source 1..20: mol_type = other RNA; note = PE3 ngRNA spacer (TG PAM)
agagtgaggattgcagaatt

SEQ ID NO: 4510 - RNA, 20 nt, synthetic construct
  source 1..20: mol_type = other RNA; note = PE3 ngRNA spacer (TG PAM)
ataaaagttttctctgcagg

SEQ ID NO: 4511 - RNA, 20 nt, synthetic construct
  source 1..20: mol_type = other RNA; note = PE3b ngRNA spacer (AG PAM)
attgcagaatttgttcactg

SEQ ID NO: 4512 - RNA, 20 nt, synthetic construct
  source 1..20: mol_type = other RNA; note = PE3 ngRNA spacer (AG PAM)
atttgttcactgagccatgg

SEQ ID NO: 4513 - RNA, 20 nt, synthetic construct
  source 1..20: mol_type = other RNA; note = PE3 ngRNA spacer (GG PAM)
catggaggttacactggcag

SEQ ID NO: 4514 - RNA, 20 nt, synthetic construct
  source 1..20: mol_type = other RNA; note = PE3 ngRNA spacer (GG PAM)
catggaggttacattggcag

SEQ ID NO: 4515 - RNA, 20 nt, synthetic construct
  source 1..20: mol_type = other RNA; note = PE3 ngRNA spacer (GG PAM)
ccatggaggttacactggca

SEQ ID NO: 4516 - RNA, 20 nt, synthetic construct
  source 1..20: mol_type = other RNA; note = PE3 ngRNA spacer (GG PAM)
ccatggaggttacattggca

SEQ ID NO: 4517 - RNA, 20 nt, synthetic construct
  source 1..20: mol_type = other RNA; note = PE3 ngRNA spacer (TG PAM)
ctgagccatggaggttacac

SEQ ID NO: 4518 - RNA, 20 nt, synthetic construct
  source 1..20: mol_type = other RNA; note = PE3 ngRNA spacer (TG PAM)
ctgagccatggaggttacat

SEQ ID NO: 4519 - RNA, 20 nt, synthetic construct
  source 1..20: mol_type = other RNA; note = PE3 ngRNA spacer (AG PAM)
ctgcccagagtgaggattgc

SEQ ID NO: 4520 - RNA, 20 nt, synthetic construct
  source 1..20: mol_type = other RNA; note = PE3 ngRNA spacer (AG PAM)
gccatggaggttacactggc

SEQ ID NO: 4521 - RNA, 20 nt, synthetic construct
  source 1..20: mol_type = other RNA; note = PE3 ngRNA spacer (AG PAM)
gccatggaggttacattggc

SEQ ID NO: 4522 - RNA, 20 nt, synthetic construct
  source 1..20: mol_type = other RNA; note = PE3b ngRNA spacer (TG PAM)
ggattgcagaatttgttcac

SEQ ID NO: 4523 - RNA, 20 nt, synthetic construct
  source 1..20: mol_type = other RNA; note = PE3 ngRNA spacer (GG PAM)
tgagccatggaggttacact

SEQ ID NO: 4524 - RNA, 20 nt, synthetic construct
  source 1..20: mol_type = other RNA; note = PE3 ngRNA spacer (GG PAM)
tgagccatggaggttacatt

SEQ ID NO: 4525 - RNA, 20 nt, synthetic construct
  source 1..20: mol_type = other RNA; note = PE3 ngRNA spacer (GG PAM)
tttgttcactgagccatgga

SEQ ID NO: 4526-4530 - skipped (5 entries)

SEQ ID NO: 4531 - RNA, 10 nt, synthetic construct
  source 1..10: mol_type = other RNA; note = PBS
agccatggag

SEQ ID NO: 4532 - RNA, 11 nt, synthetic construct
  source 1..11: mol_type = other RNA; note = PBS
agccatggagg

SEQ ID NO: 4533 - RNA, 12 nt, synthetic construct
  source 1..12: mol_type = other RNA; note = PBS
agccatggaggt

SEQ ID NO: 4534 - RNA, 13 nt, synthetic construct
  source 1..13: mol_type = other RNA; note = PBS
agccatggaggtt

SEQ ID NO: 4535 - RNA, 14 nt, synthetic construct
  source 1..14: mol_type = other RNA; note = PBS
agccatggaggtta

SEQ ID NO: 4536 - RNA, 15 nt, synthetic construct
  source 1..15: mol_type = other RNA; note = PBS
agccatggaggttac

SEQ ID NO: 4537 - RNA, 16 nt, synthetic construct
  source 1..16: mol_type = other RNA; note = PBS
agccatggaggttaca

SEQ ID NO: 4538 - RNA, 17 nt, synthetic construct
  source 1..17: mol_type = other RNA; note = PBS
agccatggaggttacac

SEQ ID NO: 4539 - RNA, 18 nt, synthetic construct
  source 1..18: mol_type = other RNA; note = PBS
agccatggaggttacact

SEQ ID NO: 4540 - RNA, 19 nt, synthetic construct
  source 1..19: mol_type = other RNA; note = PBS
agccatggaggttacactg

SEQ ID NO: 4541 - RNA, 17 nt, synthetic construct
  source 1..17: mol_type = other RNA; note = PEgRNA spacer (TG;TGA PAM)
taacctccatggctcag

SEQ ID NO: 4542 - RNA, 18 nt, synthetic construct
  source 1..18: mol_type = other RNA; note = PEgRNA spacer (TG;TGA PAM)
gtaacctccatggctcag

SEQ ID NO: 4543 - RNA, 19 nt, synthetic construct
  source 1..19: mol_type = other RNA; note = PEgRNA spacer (TG;TGA PAM)
tgtaacctccatggctcag

SEQ ID NO: 4544 - RNA, 21 nt, synthetic construct
  source 1..21: mol_type = other RNA; note = PEgRNA spacer (TG;TGA PAM)
agtgtaacctccatggctcag

SEQ ID NO: 4545 - RNA, 22 nt, synthetic construct
  source 1..22: mol_type = other RNA; note = PEgRNA spacer (TG;TGA PAM)
cagtgtaacctccatggctcag

SEQ ID NO: 4546 - RNA, 17 nt, synthetic construct
  source 1..17: mol_type = other RNA; note = RTT*1,3,6,8
gcagaatttgttcactg

SEQ ID NO: 4547 - RNA, 18 nt, synthetic construct
  source 1..18: mol_type = other RNA; note = RTT*1,3,6,8
tgcagaatttgttcactg

SEQ ID NO: 4548 - RNA, 19 nt, synthetic construct
  source 1..19: mol_type = other RNA; note = RTT*1,3,6,8
ttgcagaatttgttcactg

SEQ ID NO: 4549 - RNA, 20 nt, synthetic construct
  source 1..20: mol_type = other RNA; note = RTT*1,2,6,7 (TG-to-TT;TGA-to-TTA PAM silencing edit)
attgcagaatttgttaactg

SEQ ID NO: 4550 - RNA, 20 nt, synthetic construct
  source 1..20: mol_type = other RNA; note = RTT*1,4,6,9 (TGA-to-TCA;TG-to-TC PAM silencing edit)
attgcagaatttgttgactg

SEQ ID NO: 4551 - RNA, 20 nt, synthetic construct
  source 1..20: mol_type = other RNA; note = RTT*1,5,6,10 (TG-to-TA;TGA-to-TAA PAM silencing edit)
attgcagaatttgtttactg

SEQ ID NO: 4552 - RNA, 21 nt, synthetic construct
  source 1..21: mol_type = other RNA; note = RTT*1,2,6,7 (TG-to-TT;TGA-to-TTA PAM silencing edit)
gattgcagaatttgttaactg

SEQ ID NO: 4553 - RNA, 21 nt, synthetic construct
  source 1..21: mol_type = other RNA; note = RTT*1,3,6,8
gattgcagaatttgttcactg

SEQ ID NO: 4554 - RNA, 21 nt, synthetic construct
  source 1..21: mol_type = other RNA; note = RTT*1,4,6,9 (TGA-to-TCA;TG-to-TC PAM silencing edit)
gattgcagaatttgttgactg

SEQ ID NO: 4555 - RNA, 21 nt, synthetic construct
  source 1..21: mol_type = other RNA; note = RTT*1,5,6,10 (TG-to-TA;TGA-to-TAA PAM silencing edit)
gattgcagaatttgtttactg

SEQ ID NO: 4556 - RNA, 22 nt, synthetic construct
  source 1..22: mol_type = other RNA; note = RTT*1,2,6,7 (TG-to-TT;TGA-to-TTA PAM silencing edit)
ggattgcagaatttgttaactg

SEQ ID NO: 4557 - RNA, 22 nt, synthetic construct
  source 1..22: mol_type = other RNA; note = RTT*1,3,6,8
ggattgcagaatttgttcactg

SEQ ID NO: 4558 - RNA, 22 nt, synthetic construct
  source 1..22: mol_type = other RNA; note = RTT*1,4,6,9 (TGA-to-TCA;TG-to-TC PAM silencing edit)
ggattgcagaatttgttgactg

SEQ ID NO: 4559 - RNA, 22 nt, synthetic construct
  source 1..22: mol_type = other RNA; note = RTT*1,5,6,10 (TG-to-TA;TGA-to-TAA PAM silencing edit)
ggattgcagaatttgtttactg

SEQ ID NO: 4560 - RNA, 23 nt, synthetic construct
  source 1..23: mol_type = other RNA; note = RTT*1,2,6,7 (TG-to-TT;TGA-to-TTA PAM silencing edit)
aggattgcagaatttgttaactg

SEQ ID NO: 4561 - RNA, 23 nt, synthetic construct
  source 1..23: mol_type = other RNA; note = RTT*1,3,6,8
aggattgcagaatttgttcactg

SEQ ID NO: 4562 - RNA, 23 nt, synthetic construct
  source 1..23: mol_type = other RNA; note = RTT*1,4,6,9 (TGA-to-TCA;TG-to-TC PAM silencing edit)
aggattgcagaatttgttgactg

SEQ ID NO: 4563 - RNA, 23 nt, synthetic construct
  source 1..23: mol_type = other RNA; note = RTT*1,5,6,10 (TG-to-TA;TGA-to-TAA PAM silencing edit)
aggattgcagaatttgtttactg

SEQ ID NO: 4564 - RNA, 24 nt, synthetic construct
  source 1..24: mol_type = other RNA; note = RTT*1,2,6,7 (TG-to-TT;TGA-to-TTA PAM silencing edit)
gaggattgcagaatttgttaactg

SEQ ID NO: 4565 - RNA, 24 nt, synthetic construct
  source 1..24: mol_type = other RNA; note = RTT*1,3,6,8
gaggattgcagaatttgttcactg

SEQ ID NO: 4566 - RNA, 24 nt, synthetic construct
  source 1..24: mol_type = other RNA; note = RTT*1,4,6,9 (TGA-to-TCA;TG-to-TC PAM silencing edit)
gaggattgcagaatttgttgactg

SEQ ID NO: 4567 - RNA, 24 nt, synthetic construct
  source 1..24: mol_type = other RNA; note = RTT*1,5,6,10 (TG-to-TA;TGA-to-TAA PAM silencing edit)
gaggattgcagaatttgtttactg

SEQ ID NO: 4568 - RNA, 25 nt, synthetic construct
  source 1..25: mol_type = other RNA; note = RTT*1,2,6,7 (TG-to-TT;TGA-to-TTA PAM silencing edit)
tgaggattgcagaatttgttaactg

SEQ ID NO: 4569 - RNA, 25 nt, synthetic construct
  source 1..25: mol_type = other RNA; note = RTT*1,3,6,8
tgaggattgcagaatttgttcactg

SEQ ID NO: 4570 - RNA, 25 nt, synthetic construct
  source 1..25: mol_type = other RNA; note = RTT*1,4,6,9 (TGA-to-TCA;TG-to-TC PAM silencing edit)
tgaggattgcagaatttgttgactg

SEQ ID NO: 4571 - RNA, 25 nt, synthetic construct
  source 1..25: mol_type = other RNA; note = RTT*1,5,6,10 (TG-to-TA;TGA-to-TAA PAM silencing edit)
tgaggattgcagaatttgtttactg

SEQ ID NO: 4572 - RNA, 26 nt, synthetic construct
  source 1..26: mol_type = other RNA; note = RTT*1,2,6,7 (TG-to-TT;TGA-to-TTA PAM silencing edit)
gtgaggattgcagaatttgttaactg

SEQ ID NO: 4573 - RNA, 26 nt, synthetic construct
  source 1..26: mol_type = other RNA; note = RTT*1,3,6,8
gtgaggattgcagaatttgttcactg

SEQ ID NO: 4574 - RNA, 26 nt, synthetic construct
  source 1..26: mol_type = other RNA; note = RTT*1,4,6,9 (TGA-to-TCA;TG-to-TC PAM silencing edit)
gtgaggattgcagaatttgttgactg

SEQ ID NO: 4575 - RNA, 26 nt, synthetic construct
  source 1..26: mol_type = other RNA; note = RTT*1,5,6,10 (TG-to-TA;TGA-to-TAA PAM silencing edit)
gtgaggattgcagaatttgtttactg

SEQ ID NO: 4576 - RNA, 27 nt, synthetic construct
  source 1..27: mol_type = other RNA; note = RTT*1,2,6,7 (TG-to-TT;TGA-to-TTA PAM silencing edit)
agtgaggattgcagaatttgttaactg

SEQ ID NO: 4577 - RNA, 27 nt, synthetic construct
  source 1..27: mol_type = other RNA; note = RTT*1,3,6,8
agtgaggattgcagaatttgttcactg

SEQ ID NO: 4578 - RNA, 27 nt, synthetic construct
  source 1..27: mol_type = other RNA; note = RTT*1,4,6,9 (TGA-to-TCA;TG-to-TC PAM silencing edit)
agtgaggattgcagaatttgttgactg

SEQ ID NO: 4579 - RNA, 27 nt, synthetic construct
  source 1..27: mol_type = other RNA; note = RTT*1,5,6,10 (TG-to-TA;TGA-to-TAA PAM silencing edit)
agtgaggattgcagaatttgtttactg

SEQ ID NO: 4580 - RNA, 28 nt, synthetic construct
  source 1..28: mol_type = other RNA; note = RTT*1,2,6,7 (TG-to-TT;TGA-to-TTA PAM silencing edit)
gagtgaggattgcagaatttgttaactg

SEQ ID NO: 4581 - RNA, 28 nt, synthetic construct
  source 1..28: mol_type = other RNA; note = RTT*1,3,6,8
gagtgaggattgcagaatttgttcactg

SEQ ID NO: 4582 - RNA, 28 nt, synthetic construct
  source 1..28: mol_type = other RNA; note = RTT*1,4,6,9 (TGA-to-TCA;TG-to-TC PAM silencing edit)
gagtgaggattgcagaatttgttgactg

SEQ ID NO: 4583 - RNA, 28 nt, synthetic construct
  source 1..28: mol_type = other RNA; note = RTT*1,5,6,10 (TG-to-TA;TGA-to-TAA PAM silencing edit)
gagtgaggattgcagaatttgtttactg

SEQ ID NO: 4584 - RNA, 29 nt, synthetic construct
  source 1..29: mol_type = other RNA; note = RTT*1,2,6,7 (TG-to-TT;TGA-to-TTA PAM silencing edit)
agagtgaggattgcagaatttgttaactg

SEQ ID NO: 4585 - RNA, 29 nt, synthetic construct
  source 1..29: mol_type = other RNA; note = RTT*1,3,6,8
agagtgaggattgcagaatttgttcactg

SEQ ID NO: 4586 - RNA, 29 nt, synthetic construct
  source 1..29: mol_type = other RNA; note = RTT*1,4,6,9 (TGA-to-TCA;TG-to-TC PAM silencing edit)
agagtgaggattgcagaatttgttgactg

SEQ ID NO: 4587 - RNA, 29 nt, synthetic construct
  source 1..29: mol_type = other RNA; note = RTT*1,5,6,10 (TG-to-TA;TGA-to-TAA PAM silencing edit)
agagtgaggattgcagaatttgtttactg

SEQ ID NO: 4588 - RNA, 30 nt, synthetic construct
  source 1..30: mol_type = other RNA; note = RTT*1,2,6,7 (TG-to-TT;TGA-to-TTA PAM silencing edit)
cagagtgaggattgcagaatttgttaactg

SEQ ID NO: 4589 - RNA, 30 nt, synthetic construct
  source 1..30: mol_type = other RNA; note = RTT*1,3,6,8
cagagtgaggattgcagaatttgttcactg

SEQ ID NO: 4590 - RNA, 30 nt, synthetic construct
  source 1..30: mol_type = other RNA; note = RTT*1,4,6,9 (TGA-to-TCA;TG-to-TC PAM silencing edit)
cagagtgaggattgcagaatttgttgactg

SEQ ID NO: 4591 - RNA, 30 nt, synthetic construct
  source 1..30: mol_type = other RNA; note = RTT*1,5,6,10 (TG-to-TA;TGA-to-TAA PAM silencing edit)
cagagtgaggattgcagaatttgtttactg

SEQ ID NO: 4592 - RNA, 31 nt, synthetic construct
  source 1..31: mol_type = other RNA; note = RTT*1,2,6,7 (TG-to-TT;TGA-to-TTA PAM silencing edit)
ccagagtgaggattgcagaatttgttaactg

SEQ ID NO: 4593 - RNA, 31 nt, synthetic construct
  source 1..31: mol_type = other RNA; note = RTT*1,3,6,8
ccagagtgaggattgcagaatttgttcactg

SEQ ID NO: 4594 - RNA, 31 nt, synthetic construct
  source 1..31: mol_type = other RNA; note = RTT*1,4,6,9 (TGA-to-TCA;TG-to-TC PAM silencing edit)
ccagagtgaggattgcagaatttgttgactg

SEQ ID NO: 4595 - RNA, 31 nt, synthetic construct
  source 1..31: mol_type = other RNA; note = RTT*1,5,6,10 (TG-to-TA;TGA-to-TAA PAM silencing edit)
ccagagtgaggattgcagaatttgtttactg

SEQ ID NO: 4596 - RNA, 32 nt, synthetic construct
  source 1..32: mol_type = other RNA; note = RTT*1,2,6,7 (TG-to-TT;TGA-to-TTA PAM silencing edit)
cccagagtgaggattgcagaatttgttaactg

SEQ ID NO: 4597 - RNA, 32 nt, synthetic construct
  source 1..32: mol_type = other RNA; note = RTT*1,3,6,8
cccagagtgaggattgcagaatttgttcactg

SEQ ID NO: 4598 - RNA, 32 nt, synthetic construct
  source 1..32: mol_type = other RNA; note = RTT*1,4,6,9 (TGA-to-TCA;TG-to-TC PAM silencing edit)
cccagagtgaggattgcagaatttgttgactg

SEQ ID NO: 4599 - RNA, 32 nt, synthetic construct
  source 1..32: mol_type = other RNA; note = RTT*1,5,6,10 (TG-to-TA;TGA-to-TAA PAM silencing edit)
cccagagtgaggattgcagaatttgtttactg

SEQ ID NO: 4600 - RNA, 33 nt, synthetic construct
  source 1..33: mol_type = other RNA; note = RTT*1,2,6,7 (TG-to-TT;TGA-to-TTA PAM silencing edit)
gcccagagtgaggattgcagaatttgttaactg

SEQ ID NO: 4601 - RNA, 33 nt, synthetic construct
  source 1..33: mol_type = other RNA; note = RTT*1,3,6,8
gcccagagtgaggattgcagaatttgttcactg

SEQ ID NO: 4602 - RNA, 33 nt, synthetic construct
  source 1..33: mol_type = other RNA; note = RTT*1,4,6,9 (TGA-to-TCA;TG-to-TC PAM silencing edit)
gcccagagtgaggattgcagaatttgttgactg

SEQ ID NO: 4603 - RNA, 33 nt, synthetic construct
  source 1..33: mol_type = other RNA; note = RTT*1,5,6,10 (TG-to-TA;TGA-to-TAA PAM silencing edit)
gcccagagtgaggattgcagaatttgtttactg

SEQ ID NO: 4604 - RNA, 34 nt, synthetic construct
  source 1..34: mol_type = other RNA; note = RTT*1,2,6,7 (TG-to-TT;TGA-to-TTA PAM silencing edit)
tgcccagagtgaggattgcagaatttgttaactg

SEQ ID NO: 4605 - RNA, 34 nt, synthetic construct
  source 1..34: mol_type = other RNA; note = RTT*1,3,6,8
tgcccagagtgaggattgcagaatttgttcactg

SEQ ID NO: 4606 - RNA, 34 nt, synthetic construct
  source 1..34: mol_type = other RNA; note = RTT*1,4,6,9 (TGA-to-TCA;TG-to-TC PAM silencing edit)
tgcccagagtgaggattgcagaatttgttgactg

SEQ ID NO: 4607 - RNA, 34 nt, synthetic construct
  source 1..34: mol_type = other RNA; note = RTT*1,5,6,10 (TG-to-TA;TGA-to-TAA PAM silencing edit)
tgcccagagtgaggattgcagaatttgtttactg

SEQ ID NO: 4608 - RNA, 35 nt, synthetic construct
  source 1..35: mol_type = other RNA; note = RTT*1,2,6,7 (TG-to-TT;TGA-to-TTA PAM silencing edit)
ctgcccagagtgaggattgcagaatttgttaactg

SEQ ID NO: 4609 - RNA, 35 nt, synthetic construct
  source 1..35: mol_type = other RNA; note = RTT*1,3,6,8
ctgcccagagtgaggattgcagaatttgttcactg

SEQ ID NO: 4610 - RNA, 35 nt, synthetic construct
  source 1..35: mol_type = other RNA; note = RTT*1,4,6,9 (TGA-to-TCA;TG-to-TC PAM silencing edit)
ctgcccagagtgaggattgcagaatttgttgactg

SEQ ID NO: 4611 - RNA, 35 nt, synthetic construct
  source 1..35: mol_type = other RNA; note = RTT*1,5,6,10 (TG-to-TA;TGA-to-TAA PAM silencing edit)
ctgcccagagtgaggattgcagaatttgtttactg

SEQ ID NO: 4612 - RNA, 36 nt, synthetic construct
  source 1..36: mol_type = other RNA; note = RTT*1,2,6,7 (TG-to-TT;TGA-to-TTA PAM silencing edit)
actgcccagagtgaggattgcagaatttgttaactg

SEQ ID NO: 4613 - RNA, 36 nt, synthetic construct
  source 1..36: mol_type = other RNA; note = RTT*1,3,6,8
actgcccagagtgaggattgcagaatttgttcactg

SEQ ID NO: 4614 - RNA, 36 nt, synthetic construct
  source 1..36: mol_type = other RNA; note = RTT*1,4,6,9 (TGA-to-TCA;TG-to-TC PAM silencing edit)
actgcccagagtgaggattgcagaatttgttgactg

SEQ ID NO: 4615 - RNA, 36 nt, synthetic construct
  source 1..36: mol_type = other RNA; note = RTT*1,5,6,10 (TG-to-TA;TGA-to-TAA PAM silencing edit)
actgcccagagtgaggattgcagaatttgtttactg

SEQ ID NO: 4616 - RNA, 37 nt, synthetic construct
  source 1..37: mol_type = other RNA; note = RTT*1,2,6,7 (TG-to-TT;TGA-to-TTA PAM silencing edit)
cactgcccagagtgaggattgcagaatttgttaactg

SEQ ID NO: 4617 - RNA, 37 nt, synthetic construct
  source 1..37: mol_type = other RNA; note = RTT*1,3,6,8
cactgcccagagtgaggattgcagaatttgttcactg

SEQ ID NO: 4618 - RNA, 37 nt, synthetic construct
  source 1..37: mol_type = other RNA; note = RTT*1,4,6,9 (TGA-to-TCA;TG-to-TC PAM silencing edit)
cactgcccagagtgaggattgcagaatttgttgactg

SEQ ID NO: 4619 - RNA, 37 nt, synthetic construct
  source 1..37: mol_type = other RNA; note = RTT*1,5,6,10 (TG-to-TA;TGA-to-TAA PAM silencing edit)
cactgcccagagtgaggattgcagaatttgtttactg

SEQ ID NO: 4620 - RNA, 38 nt, synthetic construct
  source 1..38: mol_type = other RNA; note = RTT*1,2,6,7 (TG-to-TT;TGA-to-TTA PAM silencing edit)
acactgcccagagtgaggattgcagaatttgttaactg

SEQ ID NO: 4621 - RNA, 38 nt, synthetic construct
  source 1..38: mol_type = other RNA; note = RTT*1,3,6,8
acactgcccagagtgaggattgcagaatttgttcactg

SEQ ID NO: 4622 - RNA, 38 nt, synthetic construct
  source 1..38: mol_type = other RNA; note = RTT*1,4,6,9 (TGA-to-TCA;TG-to-TC PAM silencing edit)
acactgcccagagtgaggattgcagaatttgttgactg

SEQ ID NO: 4623 - RNA, 38 nt, synthetic construct
  source 1..38: mol_type = other RNA; note = RTT*1,5,6,10 (TG-to-TA;TGA-to-TAA PAM silencing edit)
acactgcccagagtgaggattgcagaatttgtttactg

SEQ ID NO: 4624 - RNA, 39 nt, synthetic construct
  source 1..39: mol_type = other RNA; note = RTT*1,2,6,7 (TG-to-TT;TGA-to-TTA PAM silencing edit)
cacactgcccagagtgaggattgcagaatttgttaactg

SEQ ID NO: 4625 - RNA, 39 nt, synthetic construct
  source 1..39: mol_type = other RNA; note = RTT*1,3,6,8
cacactgcccagagtgaggattgcagaatttgttcactg

SEQ ID NO: 4626 - RNA, 39 nt, synthetic construct
  source 1..39: mol_type = other RNA; note = RTT*1,4,6,9 (TGA-to-TCA;TG-to-TC PAM silencing edit)
cacactgcccagagtgaggattgcagaatttgttgactg

SEQ ID NO: 4627 - RNA, 39 nt, synthetic construct
  source 1..39: mol_type = other RNA; note = RTT*1,5,6,10 (TG-to-TA;TGA-to-TAA PAM silencing edit)
cacactgcccagagtgaggattgcagaatttgtttactg

SEQ ID NO: 4628 - RNA, 40 nt, synthetic construct
  source 1..40: mol_type = other RNA; note = RTT*1,2,6,7 (TG-to-TT;TGA-to-TTA PAM silencing edit)
tcacactgcccagagtgaggattgcagaatttgttaactg

SEQ ID NO: 4629 - RNA, 40 nt, synthetic construct
  source 1..40: mol_type = other RNA; note = RTT*1,3,6,8
tcacactgcccagagtgaggattgcagaatttgttcactg

SEQ ID NO: 4630 - RNA, 40 nt, synthetic construct
  source 1..40: mol_type = other RNA; note = RTT*1,4,6,9 (TGA-to-TCA;TG-to-TC PAM silencing edit)
tcacactgcccagagtgaggattgcagaatttgttgactg

SEQ ID NO: 4631 - RNA, 40 nt, synthetic construct
  source 1..40: mol_type = other RNA; note = RTT*1,5,6,10 (TG-to-TA;TGA-to-TAA PAM silencing edit)
tcacactgcccagagtgaggattgcagaatttgtttactg

SEQ ID NO: 4632 - RNA, 96 nt, synthetic construct
  source 1..96: mol_type = other RNA; note = ngRNA
cccataaaagttttctctgcgttttagagctagaaatagcaagttaaaataaggctagtccgttatcaacttgaaaaagtggcaccgagtcggtgc

SEQ ID NO: 4633 - RNA, 100 nt, synthetic construct
  source 1..100: mol_type = other RNA; note = ngRNA
cccataaaagttttctctgcgttttagagctagaaatagcaagttaaaataaggctagtccgttatcaacttgaaaaagtggcaccgagtcggtgctttt

SEQ ID NO: 4634 - RNA, 20 nt, synthetic construct
  source 1..20: mol_type = other RNA; note = PE3 ngRNA spacer (GG PAM)
ccataaaagttttctctgca

SEQ ID NO: 4635 - RNA, 20 nt, synthetic construct
  source 1..20: mol_type = other RNA; note = PE3 ngRNA spacer (AG PAM)
cccataaaagttttctctgc

SEQ ID NO: 4636 - RNA, 20 nt, synthetic construct
  source 1..20: mol_type = other RNA; note = PE3b*7 ngRNA spacer (TG;TGA PAM)
ggattgcagaatttgttaac

SEQ ID NO: 4637 - RNA, 20 nt, synthetic construct
  source 1..20: mol_type = other RNA; note = PE3b*9 ngRNA spacer (TG;TGA PAM)
ggattgcagaatttgttgac

SEQ ID NO: 4638 - RNA, 20 nt, synthetic construct
  source 1..20: mol_type = other RNA; note = PE3b*10 ngRNA spacer (TG;TGA PAM)
ggattgcagaatttgtttac

SEQ ID NO: 4639 - RNA, 20 nt, synthetic construct
  source 1..20: mol_type = other RNA; note = PE3 ngRNA spacer (AG PAM)
ggtgacatctaacccataaa

SEQ ID NO: 4640 - RNA, 20 nt, synthetic construct
  source 1..20: mol_type = other RNA; note = PE3 ngRNA spacer (TG PAM)
taacccataaaagttttctc

SEQ ID NO: 4641 - RNA, 124 nt, synthetic construct
  source 1..124: mol_type = other RNA; note = pegRNA
gtgtaacctccatggctcaggttttagagctagaaatagcaagttaaaataaggctagtccgttatcaacttgaaaaagtggcaccgagtcggtgcattgcagaatttgttaactgagccatgg

SEQ ID NO: 4642 - RNA, 124 nt, synthetic construct
  source 1..124: mol_type = other RNA; note = pegRNA
gtgtaacctccatggctcaggttttagagctagaaatagcaagttaaaataaggctagtccgttatcaacttgaaaaagtggcaccgagtcggtgcattgcagaatttgttcactgagccatgg

SEQ ID NO: 4643 - RNA, 124 nt, synthetic construct
  source 1..124: mol_type = other RNA; note = pegRNA
gtgtaacctccatggctcaggttttagagctagaaatagcaagttaaaataaggctagtccgttatcaacttgaaaaagtggcaccgagtcggtgcattgcagaatttgttgactgagccatgg

SEQ ID NO: 4644 - RNA, 124 nt, synthetic construct
  source 1..124: mol_type = other RNA; note = pegRNA
gtgtaacctccatggctcaggttttagagctagaaatagcaagttaaaataaggctagtccgttatcaacttgaaaaagtggcaccgagtcggtgcattgcagaatttgtttactgagccatgg

SEQ ID NO: 4645 - RNA, 125 nt, synthetic construct
  source 1..125: mol_type = other RNA; note = pegRNA
gtgtaacctccatggctcaggttttagagctagaaatagcaagttaaaataaggctagtccgttatcaacttgaaaaagtggcaccgagtcggtgcattgcagaatttgttaactgagccatgga

SEQ ID NO: 4646 - RNA, 125 nt, synthetic construct
  source 1..125: mol_type = other RNA; note = pegRNA
gtgtaacctccatggctcaggttttagagctagaaatagcaagttaaaataaggctagtccgttatcaacttgaaaaagtggcaccgagtcggtgcattgcagaatttgttgactgagccatgga

SEQ ID NO: 4647 - RNA, 125 nt, synthetic construct
  source 1..125: mol_type = other RNA; note = pegRNA
gtgtaacctccatggctcaggttttagagctagaaatagcaagttaaaataaggctagtccgttatcaacttgaaaaagtggcaccgagtcggtgcattgcagaatttgtttactgagccatgga

SEQ ID NO: 4648 - RNA, 125 nt, synthetic construct
  source 1..125: mol_type = other RNA; note = pegRNA
gtgtaacctccatggctcaggttttagagctagaaatagcaagttaaaataaggctagtccgttatcaacttgaaaaagtggcaccgagtcggtgcgattgcagaatttgttaactgagccatgg

SEQ ID NO: 4649 - RNA, 125 nt, synthetic construct
  source 1..125: mol_type = other RNA; note = pegRNA
gtgtaacctccatggctcaggttttagagctagaaatagcaagttaaaataaggctagtccgttatcaacttgaaaaagtggcaccgagtcggtgcgattgcagaatttgttgactgagccatgg

SEQ ID NO: 4650 - RNA, 125 nt, synthetic construct
  source 1..125: mol_type = other RNA; note = pegRNA
gtgtaacctccatggctcaggttttagagctagaaatagcaagttaaaataaggctagtccgttatcaacttgaaaaagtggcaccgagtcggtgcgattgcagaatttgtttactgagccatgg

SEQ ID NO: 4651 - RNA, 126 nt, synthetic construct
  source 1..126: mol_type = other RNA; note = pegRNA
gtgtaacctccatggctcaggttttagagctagaaatagcaagttaaaataaggctagtccgttatcaacttgaaaaagtggcaccgagtcggtgcattgcagaatttgttaactgagccatggag

SEQ ID NO: 4652 - RNA, 126 nt, synthetic construct
  source 1..126: mol_type = other RNA; note = pegRNA
gtgtaacctccatggctcaggttttagagctagaaatagcaagttaaaataaggctagtccgttatcaacttgaaaaagtggcaccgagtcggtgcattgcagaatttgttcactgagccatggag

SEQ ID NO: 4653 - RNA, 126 nt, synthetic construct
  source 1..126: mol_type = other RNA; note = pegRNA
gtgtaacctccatggctcaggttttagagctagaaatagcaagttaaaataaggctagtccgttatcaacttgaaaaagtggcaccgagtcggtgcattgcagaatttgttgactgagccatggag

SEQ ID NO: 4654 - RNA, 126 nt, synthetic construct
  source 1..126: mol_type = other RNA; note = pegRNA
gtgtaacctccatggctcaggttttagagctagaaatagcaagttaaaataaggctagtccgttatcaacttgaaaaagtggcaccgagtcggtgcattgcagaatttgtttactgagccatggag

SEQ ID NO: 4655 - RNA, 126 nt, synthetic construct
  source 1..126: mol_type = other RNA; note = pegRNA
gtgtaacctccatggctcaggttttagagctagaaatagcaagttaaaataaggctagtccgttatcaacttgaaaaagtggcaccgagtcggtgcgattgcagaatttgttaactgagccatgga

SEQ ID NO: 4656 - RNA, 126 nt, synthetic construct
  source 1..126: mol_type = other RNA; note = pegRNA
gtgtaacctccatggctcaggttttagagctagaaatagcaagttaaaataaggctagtccgttatcaacttgaaaaagtggcaccgagtcggtgcgattgcagaatttgttgactgagccatgga

SEQ ID NO: 4657 - RNA, 126 nt, synthetic construct
  source 1..126: mol_type = other RNA; note = pegRNA
gtgtaacctccatggctcaggttttagagctagaaatagcaagttaaaataaggctagtccgttatcaacttgaaaaagtggcaccgagtcggtgcgattgcagaatttgtttactgagccatgga

SEQ ID NO: 4658 - RNA, 126 nt, synthetic construct
  source 1..126: mol_type = other RNA; note = pegRNA
gtgtaacctccatggctcaggttttagagctagaaatagcaagttaaaataaggctagtccgttatcaacttgaaaaagtggcaccgagtcggtgcggattgcagaatttgttaactgagccatgg

SEQ ID NO: 4659 - RNA, 126 nt, synthetic construct
  source 1..126: mol_type = other RNA; note = pegRNA
gtgtaacctccatggctcaggttttagagctagaaatagcaagttaaaataaggctagtccgttatcaacttgaaaaagtggcaccgagtcggtgcggattgcagaatttgttcactgagccatgg

SEQ ID NO: 4660 - RNA, 126 nt, synthetic construct
  source 1..126: mol_type = other RNA; note = pegRNA
gtgtaacctccatggctcaggttttagagctagaaatagcaagttaaaataaggctagtccgttatcaacttgaaaaagtggcaccgagtcggtgcggattgcagaatttgttgactgagccatgg

SEQ ID NO: 4661 - RNA, 126 nt, synthetic construct
  source 1..126: mol_type = other RNA; note = pegRNA
gtgtaacctccatggctcaggttttagagctagaaatagcaagttaaaataaggctagtccgttatcaacttgaaaaagtggcaccgagtcggtgcggattgcagaatttgtttactgagccatgg

SEQ ID NO: 4662 - RNA, 127 nt, synthetic construct
  source 1..127: mol_type = other RNA; note = pegRNA
gtgtaacctccatggctcaggttttagagctagaaatagcaagttaaaataaggctagtccgttatcaacttgaaaaagtggcaccgagtcggtgcaggattgcagaatttgttaactgagccatgg

SEQ ID NO: 4663 - RNA, 127 nt, synthetic construct
  source 1..127: mol_type = other RNA; note = pegRNA
gtgtaacctccatggctcaggttttagagctagaaatagcaagttaaaataaggctagtccgttatcaacttgaaaaagtggcaccgagtcggtgcaggattgcagaatttgttgactgagccatgg

SEQ ID NO: 4664 - RNA, 127 nt, synthetic construct
  source 1..127: mol_type = other RNA; note = pegRNA
gtgtaacctccatggctcaggttttagagctagaaatagcaagttaaaataaggctagtccgttatcaacttgaaaaagtggcaccgagtcggtgcaggattgcagaatttgtttactgagccatgg

SEQ ID NO: 4665 - RNA, 127 nt, synthetic construct
  source 1..127: mol_type = other RNA; note = pegRNA
gtgtaacctccatggctcaggttttagagctagaaatagcaagttaaaataaggctagtccgttatcaacttgaaaaagtggcaccgagtcggtgcattgcagaatttgttaactgagccatggagg

SEQ ID NO: 4666 - RNA, 127 nt, synthetic construct
  source 1..127: mol_type = other RNA; note = pegRNA
gtgtaacctccatggctcaggttttagagctagaaatagcaagttaaaataaggctagtccgttatcaacttgaaaaagtggcaccgagtcggtgcattgcagaatttgttgactgagccatggagg

SEQ ID NO: 4667 - RNA, 127 nt, synthetic construct
  source 1..127: mol_type = other RNA; note = pegRNA
gtgtaacctccatggctcaggttttagagctagaaatagcaagttaaaataaggctagtccgttatcaacttgaaaaagtggcaccgagtcggtgcattgcagaatttgtttactgagccatggagg

SEQ ID NO: 4668 - RNA, 127 nt, synthetic construct
  source 1..127: mol_type = other RNA; note = pegRNA
gtgtaacctccatggctcaggttttagagctagaaatagcaagttaaaataaggctagtccgttatcaacttgaaaaagtggcaccgagtcggtgcgattgcagaatttgttaactgagccatggag

SEQ ID NO: 4669 - RNA, 127 nt, synthetic construct
  source 1..127: mol_type = other RNA; note = pegRNA
gtgtaacctccatggctcaggttttagagctagaaatagcaagttaaaataaggctagtccgttatcaacttgaaaaagtggcaccgagtcggtgcgattgcagaatttgttgactgagccatggag

SEQ ID NO: 4670 - RNA, 127 nt, synthetic construct
  source 1..127: mol_type = other RNA; note = pegRNA
gtgtaacctccatggctcaggttttagagctagaaatagcaagttaaaataaggctagtccgttatcaacttgaaaaagtggcaccgagtcggtgcgattgcagaatttgtttactgagccatggag

SEQ ID NO: 4671 - RNA, 127 nt, synthetic construct
  source 1..127: mol_type = other RNA; note = pegRNA
gtgtaacctccatggctcaggttttagagctagaaatagcaagttaaaataaggctagtccgttatcaacttgaaaaagtggcaccgagtcggtgcggattgcagaatttgttaactgagccatgga

SEQ ID NO: 4672 - RNA, 127 nt, synthetic construct
  source 1..127: mol_type = other RNA; note = pegRNA
gtgtaacctccatggctcaggttttagagctagaaatagcaagttaaaataaggctagtccgttatcaacttgaaaaagtggcaccgagtcggtgcggattgcagaatttgttgactgagccatgga

SEQ ID NO: 4673 - RNA, 127 nt, synthetic construct
  source 1..127: mol_type = other RNA; note = pegRNA
gtgtaacctccatggctcaggttttagagctagaaatagcaagttaaaataaggctagtccgttatcaacttgaaaaagtggcaccgagtcggtgcggattgcagaatttgtttactgagccatgga

SEQ ID NO: 4674 - RNA, 128 nt, synthetic construct
  source 1..128: mol_type = other RNA; note = pegRNA
gtgtaacctccatggctcaggttttagagctagaaatagcaagttaaaataaggctagtccgttatcaacttgaaaaagtggcaccgagtcggtgcaggattgcagaatttgttaactgagccatgga

SEQ ID NO: 4675 - RNA, 128 nt, synthetic construct
  source 1..128: mol_type = other RNA; note = pegRNA
gtgtaacctccatggctcaggttttagagctagaaatagcaagttaaaataaggctagtccgttatcaacttgaaaaagtggcaccgagtcggtgcaggattgcagaatttgttgactgagccatgga

SEQ ID NO: 4676 - RNA, 128 nt, synthetic construct
  source 1..128: mol_type = other RNA; note = pegRNA
gtgtaacctccatggctcaggttttagagctagaaatagcaagttaaaataaggctagtccgttatcaacttgaaaaagtggcaccgagtcggtgcaggattgcagaatttgtttactgagccatgga

SEQ ID NO: 4677 - RNA, 128 nt, synthetic construct
  source 1..128: mol_type = other RNA; note = pegRNA
gtgtaacctccatggctcaggttttagagctagaaatagcaagttaaaataaggctagtccgttatcaacttgaaaaagtggcaccgagtcggtgcattgcagaatttgttaactgagccatggaggt

SEQ ID NO: 4678 - RNA, 128 nt, synthetic construct
  source 1..128: mol_type = other RNA; note = pegRNA
gtgtaacctccatggctcaggttttagagctagaaatagcaagttaaaataaggctagtccgttatcaacttgaaaaagtggcaccgagtcggtgcattgcagaatttgttaactgagccatggtttt

SEQ ID NO: 4679 - RNA, 128 nt, synthetic construct
  source 1..128: mol_type = other RNA; note = pegRNA
gtgtaacctccatggctcaggttttagagctagaaatagcaagttaaaataaggctagtccgttatcaacttgaaaaagtggcaccgagtcggtgcattgcagaatttgttcactgagccatggaggt

SEQ ID NO: 4680 - RNA, 128 nt, synthetic construct
  source 1..128: mol_type = other RNA; note = pegRNA
gtgtaacctccatggctcaggttttagagctagaaatagcaagttaaaataaggctagtccgttatcaacttgaaaaagtggcaccgagtcggtgcattgcagaatttgttcactgagccatggtttt

SEQ ID NO: 4681 - RNA, 128 nt, synthetic construct
  source 1..128: mol_type = other RNA; note = pegRNA
gtgtaacctccatggctcaggttttagagctagaaatagcaagttaaaataaggctagtccgttatcaacttgaaaaagtggcaccgagtcggtgcattgcagaatttgttgactgagccatggaggt

SEQ ID NO: 4682 - RNA, 128 nt, synthetic construct
  source 1..128: mol_type = other RNA; note = pegRNA
gtgtaacctccatggctcaggttttagagctagaaatagcaagttaaaataaggctagtccgttatcaacttgaaaaagtggcaccgagtcggtgcattgcagaatttgttgactgagccatggtttt

SEQ ID NO: 4683 - RNA, 128 nt, synthetic construct
  source 1..128: mol_type = other RNA; note = pegRNA
gtgtaacctccatggctcaggttttagagctagaaatagcaagttaaaataaggctagtccgttatcaacttgaaaaagtggcaccgagtcggtgcattgcagaatttgtttactgagccatggaggt

SEQ ID NO: 4684 - RNA, 128 nt, synthetic construct
  source 1..128: mol_type = other RNA; note = pegRNA
gtgtaacctccatggctcaggttttagagctagaaatagcaagttaaaataaggctagtccgttatcaacttgaaaaagtggcaccgagtcggtgcattgcagaatttgtttactgagccatggtttt

SEQ ID NO: 4685 - RNA, 128 nt, synthetic construct
  source 1..128: mol_type = other RNA; note = pegRNA
gtgtaacctccatggctcaggttttagagctagaaatagcaagttaaaataaggctagtccgttatcaacttgaaaaagtggcaccgagtcggtgcgaggattgcagaatttgttaactgagccatgg

SEQ ID NO: 4686 - RNA, 128 nt, synthetic construct
  source 1..128: mol_type = other RNA; note = pegRNA
gtgtaacctccatggctcaggttttagagctagaaatagcaagttaaaataaggctagtccgttatcaacttgaaaaagtggcaccgagtcggtgcgaggattgcagaatttgttcactgagccatgg

SEQ ID NO: 4687 - RNA, 128 nt, synthetic construct
  source 1..128: mol_type = other RNA; note = pegRNA
gtgtaacctccatggctcaggttttagagctagaaatagcaagttaaaataaggctagtccgttatcaacttgaaaaagtggcaccgagtcggtgcgaggattgcagaatttgttgactgagccatgg

SEQ ID NO: 4688 - RNA, 128 nt, synthetic construct
  source 1..128: mol_type = other RNA; note = pegRNA
gtgtaacctccatggctcaggttttagagctagaaatagcaagttaaaataaggctagtccgttatcaacttgaaaaagtggcaccgagtcggtgcgaggattgcagaatttgtttactgagccatgg

SEQ ID NO: 4689 - RNA, 128 nt, synthetic construct
  source 1..128: mol_type = other RNA; note = pegRNA
gtgtaacctccatggctcaggttttagagctagaaatagcaagttaaaataaggctagtccgttatcaacttgaaaaagtggcaccgagtcggtgcgattgcagaatttgttaactgagccatggagg

SEQ ID NO: 4690 - RNA, 128 nt, synthetic construct
  source 1..128: mol_type = other RNA; note = pegRNA
gtgtaacctccatggctcaggttttagagctagaaatagcaagttaaaataaggctagtccgttatcaacttgaaaaagtggcaccgagtcggtgcgattgcagaatttgttgactgagccatggagg

SEQ ID NO: 4691 - RNA, 128 nt, synthetic construct
  source 1..128: mol_type = other RNA; note = pegRNA
gtgtaacctccatggctcaggttttagagctagaaatagcaagttaaaataaggctagtccgttatcaacttgaaaaagtggcaccgagtcggtgcgattgcagaatttgtttactgagccatggagg

SEQ ID NO: 4692 - RNA, 128 nt, synthetic construct
  source 1..128: mol_type = other RNA; note = pegRNA
gtgtaacctccatggctcaggttttagagctagaaatagcaagttaaaataaggctagtccgttatcaacttgaaaaagtggcaccgagtcggtgcggattgcagaatttgttaactgagccatggag

SEQ ID NO: 4693 - RNA, 128 nt, synthetic construct
  source 1..128: mol_type = other RNA; note = pegRNA
gtgtaacctccatggctcaggttttagagctagaaatagcaagttaaaataaggctagtccgttatcaacttgaaaaagtggcaccgagtcggtgcggattgcagaatttgttcactgagccatggag

SEQ ID NO: 4694 - RNA, 128 nt, synthetic construct
  source 1..128: mol_type = other RNA; note = pegRNA
gtgtaacctccatggctcaggttttagagctagaaatagcaagttaaaataaggctagtccgttatcaacttgaaaaagtggcaccgagtcggtgcggattgcagaatttgttgactgagccatggag

SEQ ID NO: 4695 - RNA, 128 nt, synthetic construct
  source 1..128: mol_type = other RNA; note = pegRNA
gtgtaacctccatggctcaggttttagagctagaaatagcaagttaaaataaggctagtccgttatcaacttgaaaaagtggcaccgagtcggtgcggattgcagaatttgtttactgagccatggag

SEQ ID NO: 4696 - RNA, 129 nt, synthetic construct
  source 1..129: mol_type = other RNA; note = pegRNA
gtgtaacctccatggctcaggttttagagctagaaatagcaagttaaaataaggctagtccgttatcaacttgaaaaagtggcaccgagtcggtgcaggattgcagaatttgttaactgagccatggag

SEQ ID NO: 4697 - RNA, 129 nt, synthetic construct
  source 1..129: mol_type = other RNA; note = pegRNA
gtgtaacctccatggctcaggttttagagctagaaatagcaagttaaaataaggctagtccgttatcaacttgaaaaagtggcaccgagtcggtgcaggattgcagaatttgttgactgagccatggag

SEQ ID NO: 4698 - RNA, 129 nt, synthetic construct
  source 1..129: mol_type = other RNA; note = pegRNA
gtgtaacctccatggctcaggttttagagctagaaatagcaagttaaaataaggctagtccgttatcaacttgaaaaagtggcaccgagtcggtgcaggattgcagaatttgtttactgagccatggag

SEQ ID NO: 4699 - RNA, 129 nt, synthetic construct
  source 1..129: mol_type = other RNA; note = pegRNA
gtgtaacctccatggctcaggttttagagctagaaatagcaagttaaaataaggctagtccgttatcaacttgaaaaagtggcaccgagtcggtgcattgcagaatttgttaactgagccatggaggtt

SEQ ID NO: 4700 - RNA, 129 nt, synthetic construct
  source 1..129: mol_type = other RNA; note = pegRNA
gtgtaacctccatggctcaggttttagagctagaaatagcaagttaaaataaggctagtccgttatcaacttgaaaaagtggcaccgagtcggtgcattgcagaatttgttaactgagccatggatttt

SEQ ID NO: 4701 - RNA, 129 nt, synthetic construct
  source 1..129: mol_type = other RNA; note = pegRNA
gtgtaacctccatggctcaggttttagagctagaaatagcaagttaaaataaggctagtccgttatcaacttgaaaaagtggcaccgagtcggtgcattgcagaatttgttgactgagccatggaggtt

SEQ ID NO: 4702 - RNA, 129 nt, synthetic construct
  source 1..129: mol_type = other RNA; note = pegRNA
gtgtaacctccatggctcaggttttagagctagaaatagcaagttaaaataaggctagtccgttatcaacttgaaaaagtggcaccgagtcggtgcattgcagaatttgttgactgagccatggatttt

SEQ ID NO: 4703 - RNA, 129 nt, synthetic construct
  source 1..129: mol_type = other RNA; note = pegRNA
gtgtaacctccatggctcaggttttagagctagaaatagcaagttaaaataaggctagtccgttatcaacttgaaaaagtggcaccgagtcggtgcattgcagaatttgtttactgagccatggaggtt

SEQ ID NO: 4704 - RNA, 129 nt, synthetic construct
  source 1..129: mol_type = other RNA; note = pegRNA
gtgtaacctccatggctcaggttttagagctagaaatagcaagttaaaataaggctagtccgttatcaacttgaaaaagtggcaccgagtcggtgcattgcagaatttgtttactgagccatggatttt

SEQ ID NO: 4705 - RNA, 129 nt, synthetic construct
  source 1..129: mol_type = other RNA; note = pegRNA
gtgtaacctccatggctcaggttttagagctagaaatagcaagttaaaataaggctagtccgttatcaacttgaaaaagtggcaccgagtcggtgcgaggattgcagaatttgttaactgagccatgga

SEQ ID NO: 4706 - RNA, 129 nt, synthetic construct
  source 1..129: mol_type = other RNA; note = pegRNA
gtgtaacctccatggctcaggttttagagctagaaatagcaagttaaaataaggctagtccgttatcaacttgaaaaagtggcaccgagtcggtgcgaggattgcagaatttgttgactgagccatgga

SEQ ID NO: 4707 - RNA, 129 nt, synthetic construct
  source 1..129: mol_type = other RNA; note = pegRNA
gtgtaacctccatggctcaggttttagagctagaaatagcaagttaaaataaggctagtccgttatcaacttgaaaaagtggcaccgagtcggtgcgaggattgcagaatttgtttactgagccatgga

SEQ ID NO: 4708 - RNA, 129 nt, synthetic construct
  source 1..129: mol_type = other RNA; note = pegRNA
gtgtaacctccatggctcaggttttagagctagaaatagcaagttaaaataaggctagtccgttatcaacttgaaaaagtggcaccgagtcggtgcgattgcagaatttgttaactgagccatggaggt

SEQ ID NO: 4709 - RNA, 129 nt, synthetic construct
  source 1..129: mol_type = other RNA; note = pegRNA
gtgtaacctccatggctcaggttttagagctagaaatagcaagttaaaataaggctagtccgttatcaacttgaaaaagtggcaccgagtcggtgcgattgcagaatttgttaactgagccatggtttt

SEQ ID NO: 4710 - RNA, 129 nt, synthetic construct
  source 1..129: mol_type = other RNA; note = pegRNA
gtgtaacctccatggctcaggttttagagctagaaatagcaagttaaaataaggctagtccgttatcaacttgaaaaagtggcaccgagtcggtgcgattgcagaatttgttgactgagccatggaggt

SEQ ID NO: 4711 - RNA, 129 nt, synthetic construct
  source 1..129: mol_type = other RNA; note = pegRNA
gtgtaacctccatggctcaggttttagagctagaaatagcaagttaaaataaggctagtccgttatcaacttgaaaaagtggcaccgagtcggtgcgattgcagaatttgttgactgagccatggtttt

SEQ ID NO: 4712 - RNA, 129 nt, synthetic construct
  source 1..129: mol_type = other RNA; note = pegRNA
gtgtaacctccatggctcaggttttagagctagaaatagcaagttaaaataaggctagtccgttatcaacttgaaaaagtggcaccgagtcggtgcgattgcagaatttgtttactgagccatggaggt

SEQ ID NO: 4713 - RNA, 129 nt, synthetic construct
  source 1..129: mol_type = other RNA; note = pegRNA
gtgtaacctccatggctcaggttttagagctagaaatagcaagttaaaataaggctagtccgttatcaacttgaaaaagtggcaccgagtcggtgcgattgcagaatttgtttactgagccatggtttt

SEQ ID NO: 4714 - RNA, 129 nt, synthetic construct
  source 1..129: mol_type = other RNA; note = pegRNA
gtgtaacctccatggctcaggttttagagctagaaatagcaagttaaaataaggctagtccgttatcaacttgaaaaagtggcaccgagtcggtgcggattgcagaatttgttaactgagccatggagg

SEQ ID NO: 4715 - RNA, 129 nt, synthetic construct
  source 1..129: mol_type = other RNA; note = pegRNA
gtgtaacctccatggctcaggttttagagctagaaatagcaagttaaaataaggctagtccgttatcaacttgaaaaagtggcaccgagtcggtgcggattgcagaatttgttgactgagccatggagg

SEQ ID NO: 4716 - RNA, 129 nt, synthetic construct
  source 1..129: mol_type = other RNA; note = pegRNA
gtgtaacctccatggctcaggttttagagctagaaatagcaagttaaaataaggctagtccgttatcaacttgaaaaagtggcaccgagtcggtgcggattgcagaatttgtttactgagccatggagg

SEQ ID NO: 4717 - RNA, 129 nt, synthetic construct
  source 1..129: mol_type = other RNA; note = pegRNA
gtgtaacctccatggctcaggttttagagctagaaatagcaagttaaaataaggctagtccgttatcaacttgaaaaagtggcaccgagtcggtgctgaggattgcagaatttgttaactgagccatgg

SEQ ID NO: 4718 - RNA, 129 nt, synthetic construct
  source 1..129: mol_type = other RNA; note = pegRNA
gtgtaacctccatggctcaggttttagagctagaaatagcaagttaaaataaggctagtccgttatcaacttgaaaaagtggcaccgagtcggtgctgaggattgcagaatttgttgactgagccatgg

SEQ ID NO: 4719 - RNA, 129 nt, synthetic construct
  source 1..129: mol_type = other RNA; note = pegRNA
gtgtaacctccatggctcaggttttagagctagaaatagcaagttaaaataaggctagtccgttatcaacttgaaaaagtggcaccgagtcggtgctgaggattgcagaatttgtttactgagccatgg

SEQ ID NO: 4720 - RNA, 130 nt, synthetic construct
  source 1..130: mol_type = other RNA; note = pegRNA
gtgtaacctccatggctcaggttttagagctagaaatagcaagttaaaataaggctagtccgttatcaacttgaaaaagtggcaccgagtcggtgcaggattgcagaatttgttaactgagccatggagg

SEQ ID NO: 4721 - RNA, 130 nt, synthetic construct
  source 1..130: mol_type = other RNA; note = pegRNA
gtgtaacctccatggctcaggttttagagctagaaatagcaagttaaaataaggctagtccgttatcaacttgaaaaagtggcaccgagtcggtgcaggattgcagaatttgttgactgagccatggagg

SEQ ID NO: 4722 - RNA, 130 nt, synthetic construct
  source 1..130: mol_type = other RNA; note = pegRNA
gtgtaacctccatggctcaggttttagagctagaaatagcaagttaaaataaggctagtccgttatcaacttgaaaaagtggcaccgagtcggtgcaggattgcagaatttgtttactgagccatggagg

SEQ ID NO: 4723 - RNA, 130 nt, synthetic construct
  source 1..130: mol_type = other RNA; note = pegRNA
gtgtaacctccatggctcaggttttagagctagaaatagcaagttaaaataaggctagtccgttatcaacttgaaaaagtggcaccgagtcggtgcattgcagaatttgttaactgagccatggaggtta

SEQ ID NO: 4724 - RNA, 130 nt, synthetic construct
  source 1..130: mol_type = other RNA; note = pegRNA
gtgtaacctccatggctcaggttttagagctagaaatagcaagttaaaataaggctagtccgttatcaacttgaaaaagtggcaccgagtcggtgcattgcagaatttgttaactgagccatggagtttt

SEQ ID NO: 4725 - RNA, 130 nt, synthetic construct
  source 1..130: mol_type = other RNA; note = pegRNA
gtgtaacctccatggctcaggttttagagctagaaatagcaagttaaaataaggctagtccgttatcaacttgaaaaagtggcaccgagtcggtgcattgcagaatttgttcactgagccatggaggtta

SEQ ID NO: 4726 - RNA, 130 nt, synthetic construct
  source 1..130: mol_type = other RNA; note = pegRNA
gtgtaacctccatggctcaggttttagagctagaaatagcaagttaaaataaggctagtccgttatcaacttgaaaaagtggcaccgagtcggtgcattgcagaatttgttcactgagccatggagtttt

SEQ ID NO: 4727 - RNA, 130 nt, synthetic construct
  source 1..130: mol_type = other RNA; note = pegRNA
gtgtaacctccatggctcaggttttagagctagaaatagcaagttaaaataaggctagtccgttatcaacttgaaaaagtggcaccgagtcggtgcattgcagaatttgttgactgagccatggaggtta

SEQ ID NO: 4728 - RNA, 130 nt, synthetic construct
  source 1..130: mol_type = other RNA; note = pegRNA
gtgtaacctccatggctcaggttttagagctagaaatagcaagttaaaataaggctagtccgttatcaacttgaaaaagtggcaccgagtcggtgcattgcagaatttgttgactgagccatggagtttt

SEQ ID NO: 4729 - RNA, 130 nt, synthetic construct
  source 1..130: mol_type = other RNA; note = pegRNA
gtgtaacctccatggctcaggttttagagctagaaatagcaagttaaaataaggctagtccgttatcaacttgaaaaagtggcaccgagtcggtgcattgcagaatttgtttactgagccatggaggtta

SEQ ID NO: 4730 - RNA, 130 nt, synthetic construct
  source 1..130: mol_type = other RNA; note = pegRNA
gtgtaacctccatggctcaggttttagagctagaaatagcaagttaaaataaggctagtccgttatcaacttgaaaaagtggcaccgagtcggtgcattgcagaatttgtttactgagccatggagtttt

SEQ ID NO: 4731 - RNA, 130 nt, synthetic construct
  source 1..130: mol_type = other RNA; note = pegRNA
gtgtaacctccatggctcaggttttagagctagaaatagcaagttaaaataaggctagtccgttatcaacttgaaaaagtggcaccgagtcggtgcgaggattgcagaatttgttaactgagccatggag

SEQ ID NO: 4732 - RNA, 130 nt, synthetic construct
  source 1..130: mol_type = other RNA; note = pegRNA
gtgtaacctccatggctcaggttttagagctagaaatagcaagttaaaataaggctagtccgttatcaacttgaaaaagtggcaccgagtcggtgcgaggattgcagaatttgttcactgagccatggag

SEQ ID NO: 4733 - RNA, 130 nt, synthetic construct
  source 1..130: mol_type = other RNA; note = pegRNA
gtgtaacctccatggctcaggttttagagctagaaatagcaagttaaaataaggctagtccgttatcaacttgaaaaagtggcaccgagtcggtgcgaggattgcagaatttgttgactgagccatggag

SEQ ID NO: 4734 - RNA, 130 nt, synthetic construct
  source 1..130: mol_type = other RNA; note = pegRNA
gtgtaacctccatggctcaggttttagagctagaaatagcaagttaaaataaggctagtccgttatcaacttgaaaaagtggcaccgagtcggtgcgaggattgcagaatttgtttactgagccatggag

SEQ ID NO: 4735 - RNA, 130 nt, synthetic construct
  source 1..130: mol_type = other RNA; note = pegRNA
gtgtaacctccatggctcaggttttagagctagaaatagcaagttaaaataaggctagtccgttatcaacttgaaaaagtggcaccgagtcggtgcgattgcagaatttgttaactgagccatggaggtt

SEQ ID NO: 4736 - RNA, 130 nt, synthetic construct
  source 1..130: mol_type = other RNA; note = pegRNA
gtgtaacctccatggctcaggttttagagctagaaatagcaagttaaaataaggctagtccgttatcaacttgaaaaagtggcaccgagtcggtgcgattgcagaatttgttaactgagccatggatttt

SEQ ID NO: 4737 - RNA, 130 nt, synthetic construct
  source 1..130: mol_type = other RNA; note = pegRNA
gtgtaacctccatggctcaggttttagagctagaaatagcaagttaaaataaggctagtccgttatcaacttgaaaaagtggcaccgagtcggtgcgattgcagaatttgttgactgagccatggaggtt

SEQ ID NO: 4738 - RNA, 130 nt, synthetic construct
  source 1..130: mol_type = other RNA; note = pegRNA
gtgtaacctccatggctcaggttttagagctagaaatagcaagttaaaataaggctagtccgttatcaacttgaaaaagtggcaccgagtcggtgcgattgcagaatttgttgactgagccatggatttt

SEQ ID NO: 4739 - RNA, 130 nt, synthetic construct
  source 1..130: mol_type = other RNA; note = pegRNA
gtgtaacctccatggctcaggttttagagctagaaatagcaagttaaaataaggctagtccgttatcaacttgaaaaagtggcaccgagtcggtgcgattgcagaatttgtttactgagccatggaggtt

SEQ ID NO: 4740 - RNA, 130 nt, synthetic construct
  source 1..130: mol_type = other RNA; note = pegRNA
gtgtaacctccatggctcaggttttagagctagaaatagcaagttaaaataaggctagtccgttatcaacttgaaaaagtggcaccgagtcggtgcgattgcagaatttgtttactgagccatggatttt

SEQ ID NO: 4741 - RNA, 130 nt, synthetic construct
  source 1..130: mol_type = other RNA; note = pegRNA
gtgtaacctccatggctcaggttttagagctagaaatagcaagttaaaataaggctagtccgttatcaacttgaaaaagtggcaccgagtcggtgcggattgcagaatttgttaactgagccatggaggt

SEQ ID NO: 4742 - RNA, 130 nt, synthetic construct
  source 1..130: mol_type = other RNA; note = pegRNA
gtgtaacctccatggctcaggttttagagctagaaatagcaagttaaaataaggctagtccgttatcaacttgaaaaagtggcaccgagtcggtgcggattgcagaatttgttaactgagccatggtttt

SEQ ID NO: 4743 - RNA, 130 nt, synthetic construct
  source 1..130: mol_type = other RNA; note = pegRNA
gtgtaacctccatggctcaggttttagagctagaaatagcaagttaaaataaggctagtccgttatcaacttgaaaaagtggcaccgagtcggtgcggattgcagaatttgttcactgagccatggaggt

SEQ ID NO: 4744 - RNA, 130 nt, synthetic construct
  source 1..130: mol_type = other RNA; note = pegRNA
gtgtaacctccatggctcaggttttagagctagaaatagcaagttaaaataaggctagtccgttatcaacttgaaaaagtggcaccgagtcggtgcggattgcagaatttgttcactgagccatggtttt

SEQ ID NO: 4745 - RNA, 130 nt, synthetic construct
  source 1..130: mol_type = other RNA; note = pegRNA
gtgtaacctccatggctcaggttttagagctagaaatagcaagttaaaataaggctagtccgttatcaacttgaaaaagtggcaccgagtcggtgcggattgcagaatttgttgactgagccatggaggt

SEQ ID NO: 4746 - RNA, 130 nt, synthetic construct
  source 1..130: mol_type = other RNA; note = pegRNA
gtgtaacctccatggctcaggttttagagctagaaatagcaagttaaaataaggctagtccgttatcaacttgaaaaagtggcaccgagtcggtgcggattgcagaatttgttgactgagccatggtttt

SEQ ID NO: 4747 - RNA, 130 nt, synthetic construct
  source 1..130: mol_type = other RNA; note = pegRNA
gtgtaacctccatggctcaggttttagagctagaaatagcaagttaaaataaggctagtccgttatcaacttgaaaaagtggcaccgagtcggtgcggattgcagaatttgtttactgagccatggaggt

SEQ ID NO: 4748 - RNA, 130 nt, synthetic construct
  source 1..130: mol_type = other RNA; note = pegRNA
gtgtaacctccatggctcaggttttagagctagaaatagcaagttaaaataaggctagtccgttatcaacttgaaaaagtggcaccgagtcggtgcggattgcagaatttgtttactgagccatggtttt

SEQ ID NO: 4749 - RNA, 130 nt, synthetic construct
  source 1..130: mol_type = other RNA; note = pegRNA
gtgtaacctccatggctcaggttttagagctagaaatagcaagttaaaataaggctagtccgttatcaacttgaaaaagtggcaccgagtcggtgcgtgaggattgcagaatttgttaactgagccatgg

SEQ ID NO: 4750 - RNA, 130 nt, synthetic construct
  source 1..130: mol_type = other RNA; note = pegRNA
gtgtaacctccatggctcaggttttagagctagaaatagcaagttaaaataaggctagtccgttatcaacttgaaaaagtggcaccgagtcggtgcgtgaggattgcagaatttgttcactgagccatgg

SEQ ID NO: 4751 - RNA, 130 nt, synthetic construct
  source 1..130: mol_type = other RNA; note = pegRNA
gtgtaacctccatggctcaggttttagagctagaaatagcaagttaaaataaggctagtccgttatcaacttgaaaaagtggcaccgagtcggtgcgtgaggattgcagaatttgttgactgagccatgg

SEQ ID NO: 4752 - RNA, 130 nt, synthetic construct
  source 1..130: mol_type = other RNA; note = pegRNA
gtgtaacctccatggctcaggttttagagctagaaatagcaagttaaaataaggctagtccgttatcaacttgaaaaagtggcaccgagtcggtgcgtgaggattgcagaatttgtttactgagccatgg

SEQ ID NO: 4753 - RNA, 130 nt, synthetic construct
  source 1..130: mol_type = other RNA; note = pegRNA
gtgtaacctccatggctcaggttttagagctagaaatagcaagttaaaataaggctagtccgttatcaacttgaaaaagtggcaccgagtcggtgctgaggattgcagaatttgttaactgagccatgga

SEQ ID NO: 4754 - RNA, 130 nt, synthetic construct
  source 1..130: mol_type = other RNA; note = pegRNA
gtgtaacctccatggctcaggttttagagctagaaatagcaagttaaaataaggctagtccgttatcaacttgaaaaagtggcaccgagtcggtgctgaggattgcagaatttgttgactgagccatgga

SEQ ID NO: 4755 - RNA, 130 nt, synthetic construct
  source 1..130: mol_type = other RNA; note = pegRNA
gtgtaacctccatggctcaggttttagagctagaaatagcaagttaaaataaggctagtccgttatcaacttgaaaaagtggcaccgagtcggtgctgaggattgcagaatttgtttactgagccatgga

SEQ ID NO: 4756 - RNA, 131 nt, synthetic construct
  source 1..131: mol_type = other RNA; note = pegRNA
gtgtaacctccatggctcaggttttagagctagaaatagcaagttaaaataaggctagtccgttatcaacttgaaaaagtggcaccgagtcggtgcaggattgcagaatttgttaactgagccatggaggt

SEQ ID NO: 4757 - RNA, 131 nt, synthetic construct
  source 1..131: mol_type = other RNA; note = pegRNA
gtgtaacctccatggctcaggttttagagctagaaatagcaagttaaaataaggctagtccgttatcaacttgaaaaagtggcaccgagtcggtgcaggattgcagaatttgttaactgagccatggtttt

SEQ ID NO: 4758 - RNA, 131 nt, synthetic construct
  source 1..131: mol_type = other RNA; note = pegRNA
gtgtaacctccatggctcaggttttagagctagaaatagcaagttaaaataaggctagtccgttatcaacttgaaaaagtggcaccgagtcggtgcaggattgcagaatttgttgactgagccatggaggt

SEQ ID NO: 4759 - RNA, 131 nt, synthetic construct
  source 1..131: mol_type = other RNA; note = pegRNA
gtgtaacctccatggctcaggttttagagctagaaatagcaagttaaaataaggctagtccgttatcaacttgaaaaagtggcaccgagtcggtgcaggattgcagaatttgttgactgagccatggtttt

SEQ ID NO: 4760 - RNA, 131 nt, synthetic construct
  source 1..131: mol_type = other RNA; note = pegRNA
gtgtaacctccatggctcaggttttagagctagaaatagcaagttaaaataaggctagtccgttatcaacttgaaaaagtggcaccgagtcggtgcaggattgcagaatttgtttactgagccatggaggt

SEQ ID NO: 4761 - RNA, 131 nt, synthetic construct
  source 1..131: mol_type = other RNA; note = pegRNA
gtgtaacctccatggctcaggttttagagctagaaatagcaagttaaaataaggctagtccgttatcaacttgaaaaagtggcaccgagtcggtgcaggattgcagaatttgtttactgagccatggtttt

SEQ ID NO: 4762 - RNA, 131 nt, synthetic construct
  source 1..131: mol_type = other RNA; note = pegRNA
gtgtaacctccatggctcaggttttagagctagaaatagcaagttaaaataaggctagtccgttatcaacttgaaaaagtggcaccgagtcggtgcagtgaggattgcagaatttgttaactgagccatgg

SEQ ID NO: 4763 - RNA, 131 nt, synthetic construct
  source 1..131: mol_type = other RNA; note = pegRNA
gtgtaacctccatggctcaggttttagagctagaaatagcaagttaaaataaggctagtccgttatcaacttgaaaaagtggcaccgagtcggtgcagtgaggattgcagaatttgttgactgagccatgg

SEQ ID NO: 4764 - RNA, 131 nt, synthetic construct
  source 1..131: mol_type = other RNA; note = pegRNA
gtgtaacctccatggctcaggttttagagctagaaatagcaagttaaaataaggctagtccgttatcaacttgaaaaagtggcaccgagtcggtgcagtgaggattgcagaatttgtttactgagccatgg

SEQ ID NO: 4765 - RNA, 131 nt, synthetic construct
  source 1..131: mol_type = other RNA; note = pegRNA
gtgtaacctccatggctcaggttttagagctagaaatagcaagttaaaataaggctagtccgttatcaacttgaaaaagtggcaccgagtcggtgcattgcagaatttgttaactgagccatggaggttac

SEQ ID NO: 4766 - RNA, 131 nt, synthetic construct
  source 1..131: mol_type = other RNA; note = pegRNA
gtgtaacctccatggctcaggttttagagctagaaatagcaagttaaaataaggctagtccgttatcaacttgaaaaagtggcaccgagtcggtgcattgcagaatttgttaactgagccatggaggtttt

SEQ ID NO: 4767 - RNA, 131 nt, synthetic construct
  source 1..131: mol_type = other RNA; note = pegRNA
gtgtaacctccatggctcaggttttagagctagaaatagcaagttaaaataaggctagtccgttatcaacttgaaaaagtggcaccgagtcggtgcattgcagaatttgttgactgagccatggaggttac

SEQ ID NO: 4768 - RNA, 131 nt, synthetic construct
  source 1..131: mol_type = other RNA; note = pegRNA
gtgtaacctccatggctcaggttttagagctagaaatagcaagttaaaataaggctagtccgttatcaacttgaaaaagtggcaccgagtcggtgcattgcagaatttgttgactgagccatggaggtttt

SEQ ID NO: 4769 - RNA, 131 nt, synthetic construct
  source 1..131: mol_type = other RNA; note = pegRNA
gtgtaacctccatggctcaggttttagagctagaaatagcaagttaaaataaggctagtccgttatcaacttgaaaaagtggcaccgagtcggtgcattgcagaatttgtttactgagccatggaggttac

SEQ ID NO: 4770 - RNA, 131 nt, synthetic construct
  source 1..131: mol_type = other RNA; note = pegRNA
gtgtaacctccatggctcaggttttagagctagaaatagcaagttaaaataaggctagtccgttatcaacttgaaaaagtggcaccgagtcggtgcattgcagaatttgtttactgagccatggaggtttt

SEQ ID NO: 4771 - RNA, 131 nt, synthetic construct
  source 1..131: mol_type = other RNA; note = pegRNA
gtgtaacctccatggctcaggttttagagctagaaatagcaagttaaaataaggctagtccgttatcaacttgaaaaagtggcaccgagtcggtgcgaggattgcagaatttgttaactgagccatggagg

SEQ ID NO: 4772 - RNA, 131 nt, synthetic construct
  source 1..131: mol_type = other RNA; note = pegRNA
gtgtaacctccatggctcaggttttagagctagaaatagcaagttaaaataaggctagtccgttatcaacttgaaaaagtggcaccgagtcggtgcgaggattgcagaatttgttgactgagccatggagg

SEQ ID NO: 4773 - RNA, 131 nt, synthetic construct
  source 1..131: mol_type = other RNA; note = pegRNA
gtgtaacctccatggctcaggttttagagctagaaatagcaagttaaaataaggctagtccgttatcaacttgaaaaagtggcaccgagtcggtgcgaggattgcagaatttgtttactgagccatggagg

SEQ ID NO: 4774 - RNA, 131 nt, synthetic construct
  source 1..131: mol_type = other RNA; note = pegRNA
gtgtaacctccatggctcaggttttagagctagaaatagcaagttaaaataaggctagtccgttatcaacttgaaaaagtggcaccgagtcggtgcgattgcagaatttgttaactgagccatggaggtta

SEQ ID NO: 4775 - RNA, 131 nt, synthetic construct
  source 1..131: mol_type = other RNA; note = pegRNA
gtgtaacctccatggctcaggttttagagctagaaatagcaagttaaaataaggctagtccgttatcaacttgaaaaagtggcaccgagtcggtgcgattgcagaatttgttaactgagccatggagtttt

SEQ ID NO: 4776 - RNA, 131 nt, synthetic construct
  source 1..131: mol_type = other RNA; note = pegRNA
gtgtaacctccatggctcaggttttagagctagaaatagcaagttaaaataaggctagtccgttatcaacttgaaaaagtggcaccgagtcggtgcgattgcagaatttgttgactgagccatggaggtta

SEQ ID NO: 4777 - RNA, 131 nt, synthetic construct
  source 1..131: mol_type = other RNA; note = pegRNA
gtgtaacctccatggctcaggttttagagctagaaatagcaagttaaaataaggctagtccgttatcaacttgaaaaagtggcaccgagtcggtgcgattgcagaatttgttgactgagccatggagtttt

SEQ ID NO: 4778 - RNA, 131 nt, synthetic construct
  source 1..131: mol_type = other RNA; note = pegRNA
gtgtaacctccatggctcaggttttagagctagaaatagcaagttaaaataaggctagtccgttatcaacttgaaaaagtggcaccgagtcggtgcgattgcagaatttgtttactgagccatggaggtta

SEQ ID NO: 4779 - RNA, 131 nt, synthetic construct
  source 1..131: mol_type = other RNA; note = pegRNA
gtgtaacctccatggctcaggttttagagctagaaatagcaagttaaaataaggctagtccgttatcaacttgaaaaagtggcaccgagtcggtgcgattgcagaatttgtttactgagccatggagtttt

SEQ ID NO: 4780 - RNA, 131 nt, synthetic construct
  source 1..131: mol_type = other RNA; note = pegRNA
gtgtaacctccatggctcaggttttagagctagaaatagcaagttaaaataaggctagtccgttatcaacttgaaaaagtggcaccgagtcggtgcggattgcagaatttgttaactgagccatggaggtt

SEQ ID NO: 4781 - RNA, 131 nt, synthetic construct
  source 1..131: mol_type = other RNA; note = pegRNA
gtgtaacctccatggctcaggttttagagctagaaatagcaagttaaaataaggctagtccgttatcaacttgaaaaagtggcaccgagtcggtgcggattgcagaatttgttaactgagccatggatttt

SEQ ID NO: 4782 - RNA, 131 nt, synthetic construct
  source 1..131: mol_type = other RNA; note = pegRNA
gtgtaacctccatggctcaggttttagagctagaaatagcaagttaaaataaggctagtccgttatcaacttgaaaaagtggcaccgagtcggtgcggattgcagaatttgttgactgagccatggaggtt

SEQ ID NO: 4783 - RNA, 131 nt, synthetic construct
  source 1..131: mol_type = other RNA; note = pegRNA
gtgtaacctccatggctcaggttttagagctagaaatagcaagttaaaataaggctagtccgttatcaacttgaaaaagtggcaccgagtcggtgcggattgcagaatttgttgactgagccatggatttt

SEQ ID NO: 4784 - RNA, 131 nt, synthetic construct
  source 1..131: mol_type = other RNA; note = pegRNA
gtgtaacctccatggctcaggttttagagctagaaatagcaagttaaaataaggctagtccgttatcaacttgaaaaagtggcaccgagtcggtgcggattgcagaatttgtttactgagccatggaggtt

SEQ ID NO: 4785 - RNA, 131 nt, synthetic construct
  source 1..131: mol_type = other RNA; note = pegRNA
gtgtaacctccatggctcaggttttagagctagaaatagcaagttaaaataaggctagtccgttatcaacttgaaaaagtggcaccgagtcggtgcggattgcagaatttgtttactgagccatggatttt

SEQ ID NO: 4786 - RNA, 131 nt, synthetic construct
  source 1..131: mol_type = other RNA; note = pegRNA
gtgtaacctccatggctcaggttttagagctagaaatagcaagttaaaataaggctagtccgttatcaacttgaaaaagtggcaccgagtcggtgcgtgaggattgcagaatttgttaactgagccatgga

SEQ ID NO: 4787 - RNA, 131 nt, synthetic construct
  source 1..131: mol_type = other RNA; note = pegRNA
gtgtaacctccatggctcaggttttagagctagaaatagcaagttaaaataaggctagtccgttatcaacttgaaaaagtggcaccgagtcggtgcgtgaggattgcagaatttgttgactgagccatgga

SEQ ID NO: 4788 - RNA, 131 nt, synthetic construct
  source 1..131: mol_type = other RNA; note = pegRNA
gtgtaacctccatggctcaggttttagagctagaaatagcaagttaaaataaggctagtccgttatcaacttgaaaaagtggcaccgagtcggtgcgtgaggattgcagaatttgtttactgagccatgga

SEQ ID NO: 4789 - RNA, 131 nt, synthetic construct
  source 1..131: mol_type = other RNA; note = pegRNA
gtgtaacctccatggctcaggttttagagctagaaatagcaagttaaaataaggctagtccgttatcaacttgaaaaagtggcaccgagtcggtgctgaggattgcagaatttgttaactgagccatggag

SEQ ID NO: 4790 - RNA, 131 nt, synthetic construct
  source 1..131: mol_type = other RNA; note = pegRNA
gtgtaacctccatggctcaggttttagagctagaaatagcaagttaaaataaggctagtccgttatcaacttgaaaaagtggcaccgagtcggtgctgaggattgcagaatttgttgactgagccatggag

SEQ ID NO: 4791 - RNA, 131 nt, synthetic construct
  source 1..131: mol_type = other RNA; note = pegRNA
gtgtaacctccatggctcaggttttagagctagaaatagcaagttaaaataaggctagtccgttatcaacttgaaaaagtggcaccgagtcggtgctgaggattgcagaatttgtttactgagccatggag

SEQ ID NO: 4792 - RNA, 132 nt, synthetic construct
  source 1..132: mol_type = other RNA; note = pegRNA
gtgtaacctccatggctcaggttttagagctagaaatagcaagttaaaataaggctagtccgttatcaacttgaaaaagtggcaccgagtcggtgcaggattgcagaatttgttaactgagccatggaggtt

SEQ ID NO: 4793 - RNA, 132 nt, synthetic construct
  source 1..132: mol_type = other RNA; note = pegRNA
gtgtaacctccatggctcaggttttagagctagaaatagcaagttaaaataaggctagtccgttatcaacttgaaaaagtggcaccgagtcggtgcaggattgcagaatttgttaactgagccatggatttt

SEQ ID NO: 4794 - RNA, 132 nt, synthetic construct
  source 1..132: mol_type = other RNA; note = pegRNA
gtgtaacctccatggctcaggttttagagctagaaatagcaagttaaaataaggctagtccgttatcaacttgaaaaagtggcaccgagtcggtgcaggattgcagaatttgttgactgagccatggaggtt

SEQ ID NO: 4795 - RNA, 132 nt, synthetic construct
  source 1..132: mol_type = other RNA; note = pegRNA
gtgtaacctccatggctcaggttttagagctagaaatagcaagttaaaataaggctagtccgttatcaacttgaaaaagtggcaccgagtcggtgcaggattgcagaatttgttgactgagccatggatttt

SEQ ID NO: 4796 - RNA, 132 nt, synthetic construct
  source 1..132: mol_type = other RNA; note = pegRNA
gtgtaacctccatggctcaggttttagagctagaaatagcaagttaaaataaggctagtccgttatcaacttgaaaaagtggcaccgagtcggtgcaggattgcagaatttgtttactgagccatggaggtt

SEQ ID NO: 4797 - RNA, 132 nt, synthetic construct
  source 1..132: mol_type = other RNA; note = pegRNA
gtgtaacctccatggctcaggttttagagctagaaatagcaagttaaaataaggctagtccgttatcaacttgaaaaagtggcaccgagtcggtgcaggattgcagaatttgtttactgagccatggatttt

SEQ ID NO: 4798 - RNA, 132 nt, synthetic construct
  source 1..132: mol_type = other RNA; note = pegRNA
gtgtaacctccatggctcaggttttagagctagaaatagcaagttaaaataaggctagtccgttatcaacttgaaaaagtggcaccgagtcggtgcagtgaggattgcagaatttgttaactgagccatgga

SEQ ID NO: 4799 - RNA, 132 nt, synthetic construct
  source 1..132: mol_type = other RNA; note = pegRNA
gtgtaacctccatggctcaggttttagagctagaaatagcaagttaaaataaggctagtccgttatcaacttgaaaaagtggcaccgagtcggtgcagtgaggattgcagaatttgttgactgagccatgga

SEQ ID NO: 4800 - RNA, 132 nt, synthetic construct
  source 1..132: mol_type = other RNA; note = pegRNA
gtgtaacctccatggctcaggttttagagctagaaatagcaagttaaaataaggctagtccgttatcaacttgaaaaagtggcaccgagtcggtgcagtgaggattgcagaatttgtttactgagccatgga

SEQ ID NO: 4801 - RNA, 132 nt, synthetic construct
  source 1..132: mol_type = other RNA; note = pegRNA
gtgtaacctccatggctcaggttttagagctagaaatagcaagttaaaataaggctagtccgttatcaacttgaaaaagtggcaccgagtcggtgcattgcagaatttgttaactgagccatggaggttaca

SEQ ID NO: 4802 - RNA, 132 nt, synthetic construct
  source 1..132: mol_type = other RNA; note = pegRNA
gtgtaacctccatggctcaggttttagagctagaaatagcaagttaaaataaggctagtccgttatcaacttgaaaaagtggcaccgagtcggtgcattgcagaatttgttaactgagccatggaggttttt

SEQ ID NO: 4803 - RNA, 132 nt, synthetic construct
  source 1..132: mol_type = other RNA; note = pegRNA
gtgtaacctccatggctcaggttttagagctagaaatagcaagttaaaataaggctagtccgttatcaacttgaaaaagtggcaccgagtcggtgcattgcagaatttgttcactgagccatggaggttttt

SEQ ID NO: 4804 - RNA, 132 nt, synthetic construct
  source 1..132: mol_type = other RNA; note = pegRNA
gtgtaacctccatggctcaggttttagagctagaaatagcaagttaaaataaggctagtccgttatcaacttgaaaaagtggcaccgagtcggtgcattgcagaatttgttgactgagccatggaggttaca

SEQ ID NO: 4805 - RNA, 132 nt, synthetic construct
  source 1..132: mol_type = other RNA; note = pegRNA
gtgtaacctccatggctcaggttttagagctagaaatagcaagttaaaataaggctagtccgttatcaacttgaaaaagtggcaccgagtcggtgcattgcagaatttgttgactgagccatggaggttttt

SEQ ID NO: 4806 - RNA, 132 nt, synthetic construct
  source 1..132: mol_type = other RNA; note = pegRNA
gtgtaacctccatggctcaggttttagagctagaaatagcaagttaaaataaggctagtccgttatcaacttgaaaaagtggcaccgagtcggtgcattgcagaatttgtttactgagccatggaggttaca

SEQ ID NO: 4807 - RNA, 132 nt, synthetic construct
  source 1..132: mol_type = other RNA; note = pegRNA
gtgtaacctccatggctcaggttttagagctagaaatagcaagttaaaataaggctagtccgttatcaacttgaaaaagtggcaccgagtcggtgcattgcagaatttgtttactgagccatggaggttttt

SEQ ID NO: 4808 - RNA, 132 nt, synthetic construct
  source 1..132: mol_type = other RNA; note = pegRNA
gtgtaacctccatggctcaggttttagagctagaaatagcaagttaaaataaggctagtccgttatcaacttgaaaaagtggcaccgagtcggtgcgaggattgcagaatttgttaactgagccatggaggt

SEQ ID NO: 4809 - RNA, 132 nt, synthetic construct
  source 1..132: mol_type = other RNA; note = pegRNA
gtgtaacctccatggctcaggttttagagctagaaatagcaagttaaaataaggctagtccgttatcaacttgaaaaagtggcaccgagtcggtgcgaggattgcagaatttgttaactgagccatggtttt

SEQ ID NO: 4810 - RNA, 132 nt, synthetic construct
  source 1..132: mol_type = other RNA; note = pegRNA
gtgtaacctccatggctcaggttttagagctagaaatagcaagttaaaataaggctagtccgttatcaacttgaaaaagtggcaccgagtcggtgcgaggattgcagaatttgttcactgagccatggaggt

SEQ ID NO: 4811 - RNA, 132 nt, synthetic construct
  source 1..132: mol_type = other RNA; note = pegRNA
gtgtaacctccatggctcaggttttagagctagaaatagcaagttaaaataaggctagtccgttatcaacttgaaaaagtggcaccgagtcggtgcgaggattgcagaatttgttcactgagccatggtttt

SEQ ID NO: 4812 - RNA, 132 nt, synthetic construct
  source 1..132: mol_type = other RNA; note = pegRNA
gtgtaacctccatggctcaggttttagagctagaaatagcaagttaaaataaggctagtccgttatcaacttgaaaaagtggcaccgagtcggtgcgaggattgcagaatttgttgactgagccatggaggt

SEQ ID NO: 4813 - RNA, 132 nt, synthetic construct
  source 1..132: mol_type = other RNA; note = pegRNA
gtgtaacctccatggctcaggttttagagctagaaatagcaagttaaaataaggctagtccgttatcaacttgaaaaagtggcaccgagtcggtgcgaggattgcagaatttgttgactgagccatggtttt

SEQ ID NO: 4814 - RNA, 132 nt, synthetic construct
  source 1..132: mol_type = other RNA; note = pegRNA
gtgtaacctccatggctcaggttttagagctagaaatagcaagttaaaataaggctagtccgttatcaacttgaaaaagtggcaccgagtcggtgcgaggattgcagaatttgtttactgagccatggaggt

SEQ ID NO: 4815 - RNA, 132 nt, synthetic construct
  source 1..132: mol_type = other RNA; note = pegRNA
gtgtaacctccatggctcaggttttagagctagaaatagcaagttaaaataaggctagtccgttatcaacttgaaaaagtggcaccgagtcggtgcgaggattgcagaatttgtttactgagccatggtttt

SEQ ID NO: 4816 - RNA, 132 nt, synthetic construct
  source 1..132: mol_type = other RNA; note = pegRNA
gtgtaacctccatggctcaggttttagagctagaaatagcaagttaaaataaggctagtccgttatcaacttgaaaaagtggcaccgagtcggtgcgagtgaggattgcagaatttgttaactgagccatgg

SEQ ID NO: 4817 - RNA, 132 nt, synthetic construct
  source 1..132: mol_type = other RNA; note = pegRNA
gtgtaacctccatggctcaggttttagagctagaaatagcaagttaaaataaggctagtccgttatcaacttgaaaaagtggcaccgagtcggtgcgagtgaggattgcagaatttgttgactgagccatgg

SEQ ID NO: 4818 - RNA, 132 nt, synthetic construct
  source 1..132: mol_type = other RNA; note = pegRNA
gtgtaacctccatggctcaggttttagagctagaaatagcaagttaaaataaggctagtccgttatcaacttgaaaaagtggcaccgagtcggtgcgagtgaggattgcagaatttgtttactgagccatgg

SEQ ID NO: 4819 - RNA, 132 nt, synthetic construct
  source 1..132: mol_type = other RNA; note = pegRNA
gtgtaacctccatggctcaggttttagagctagaaatagcaagttaaaataaggctagtccgttatcaacttgaaaaagtggcaccgagtcggtgcgattgcagaatttgttaactgagccatggaggttac

SEQ ID NO: 4820 - RNA, 132 nt, synthetic construct
  source 1..132: mol_type = other RNA; note = pegRNA
gtgtaacctccatggctcaggttttagagctagaaatagcaagttaaaataaggctagtccgttatcaacttgaaaaagtggcaccgagtcggtgcgattgcagaatttgttaactgagccatggaggtttt

SEQ ID NO: 4821 - RNA, 132 nt, synthetic construct
  source 1..132: mol_type = other RNA; note = pegRNA
gtgtaacctccatggctcaggttttagagctagaaatagcaagttaaaataaggctagtccgttatcaacttgaaaaagtggcaccgagtcggtgcgattgcagaatttgttgactgagccatggaggttac

SEQ ID NO: 4822 - RNA, 132 nt, synthetic construct
  source 1..132: mol_type = other RNA; note = pegRNA
gtgtaacctccatggctcaggttttagagctagaaatagcaagttaaaataaggctagtccgttatcaacttgaaaaagtggcaccgagtcggtgcgattgcagaatttgttgactgagccatggaggtttt

SEQ ID NO: 4823 - RNA, 132 nt, synthetic construct
  source 1..132: mol_type = other RNA; note = pegRNA
gtgtaacctccatggctcaggttttagagctagaaatagcaagttaaaataaggctagtccgttatcaacttgaaaaagtggcaccgagtcggtgcgattgcagaatttgtttactgagccatggaggttac

SEQ ID NO: 4824 - RNA, 132 nt, synthetic construct
  source 1..132: mol_type = other RNA; note = pegRNA
gtgtaacctccatggctcaggttttagagctagaaatagcaagttaaaataaggctagtccgttatcaacttgaaaaagtggcaccgagtcggtgcgattgcagaatttgtttactgagccatggaggtttt

SEQ ID NO: 4825 - RNA, 132 nt, synthetic construct
  source 1..132: mol_type = other RNA; note = pegRNA
gtgtaacctccatggctcaggttttagagctagaaatagcaagttaaaataaggctagtccgttatcaacttgaaaaagtggcaccgagtcggtgcggattgcagaatttgttaactgagccatggaggtta

SEQ ID NO: 4826 - RNA, 132 nt, synthetic construct
  source 1..132: mol_type = other RNA; note = pegRNA
gtgtaacctccatggctcaggttttagagctagaaatagcaagttaaaataaggctagtccgttatcaacttgaaaaagtggcaccgagtcggtgcggattgcagaatttgttaactgagccatggagtttt

SEQ ID NO: 4827 - RNA, 132 nt, synthetic construct
  source 1..132: mol_type = other RNA; note = pegRNA
gtgtaacctccatggctcaggttttagagctagaaatagcaagttaaaataaggctagtccgttatcaacttgaaaaagtggcaccgagtcggtgcggattgcagaatttgttcactgagccatggaggtta

SEQ ID NO: 4828 - RNA, 132 nt, synthetic construct
  source 1..132: mol_type = other RNA; note = pegRNA
gtgtaacctccatggctcaggttttagagctagaaatagcaagttaaaataaggctagtccgttatcaacttgaaaaagtggcaccgagtcggtgcggattgcagaatttgttcactgagccatggagtttt

SEQ ID NO: 4829 - RNA, 132 nt, synthetic construct
  source 1..132: mol_type = other RNA; note = pegRNA
gtgtaacctccatggctcaggttttagagctagaaatagcaagttaaaataaggctagtccgttatcaacttgaaaaagtggcaccgagtcggtgcggattgcagaatttgttgactgagccatggaggtta

SEQ ID NO: 4830 - RNA, 132 nt, synthetic construct
  source 1..132: mol_type = other RNA; note = pegRNA
gtgtaacctccatggctcaggttttagagctagaaatagcaagttaaaataaggctagtccgttatcaacttgaaaaagtggcaccgagtcggtgcggattgcagaatttgttgactgagccatggagtttt

SEQ ID NO: 4831 - RNA, 132 nt, synthetic construct
  source 1..132: mol_type = other RNA; note = pegRNA
gtgtaacctccatggctcaggttttagagctagaaatagcaagttaaaataaggctagtccgttatcaacttgaaaaagtggcaccgagtcggtgcggattgcagaatttgtttactgagccatggaggtta

SEQ ID NO: 4832 - RNA, 132 nt, synthetic construct
  source 1..132: mol_type = other RNA; note = pegRNA
gtgtaacctccatggctcaggttttagagctagaaatagcaagttaaaataaggctagtccgttatcaacttgaaaaagtggcaccgagtcggtgcggattgcagaatttgtttactgagccatggagtttt

SEQ ID NO: 4833 - RNA, 132 nt, synthetic construct
  source 1..132: mol_type = other RNA; note = pegRNA
gtgtaacctccatggctcaggttttagagctagaaatagcaagttaaaataaggctagtccgttatcaacttgaaaaagtggcaccgagtcggtgcgtgaggattgcagaatttgttaactgagccatggag

SEQ ID NO: 4834 - RNA, 132 nt, synthetic construct
  source 1..132: mol_type = other RNA; note = pegRNA
gtgtaacctccatggctcaggttttagagctagaaatagcaagttaaaataaggctagtccgttatcaacttgaaaaagtggcaccgagtcggtgcgtgaggattgcagaatttgttcactgagccatggag

SEQ ID NO: 4835 - RNA, 132 nt, synthetic construct
  source 1..132: mol_type = other RNA; note = pegRNA
gtgtaacctccatggctcaggttttagagctagaaatagcaagttaaaataaggctagtccgttatcaacttgaaaaagtggcaccgagtcggtgcgtgaggattgcagaatttgttgactgagccatggag

SEQ ID NO: 4836 - RNA, 132 nt, synthetic construct
  source 1..132: mol_type = other RNA; note = pegRNA
gtgtaacctccatggctcaggttttagagctagaaatagcaagttaaaataaggctagtccgttatcaacttgaaaaagtggcaccgagtcggtgcgtgaggattgcagaatttgtttactgagccatggag

SEQ ID NO: 4837 - RNA, 132 nt, synthetic construct
  source 1..132: mol_type = other RNA; note = pegRNA
gtgtaacctccatggctcaggttttagagctagaaatagcaagttaaaataaggctagtccgttatcaacttgaaaaagtggcaccgagtcggtgctgaggattgcagaatttgttaactgagccatggagg

SEQ ID NO: 4838 - RNA, 132 nt, synthetic construct
  source 1..132: mol_type = other RNA; note = pegRNA
gtgtaacctccatggctcaggttttagagctagaaatagcaagttaaaataaggctagtccgttatcaacttgaaaaagtggcaccgagtcggtgctgaggattgcagaatttgttgactgagccatggagg

SEQ ID NO: 4839 - RNA, 132 nt, synthetic construct
  source 1..132: mol_type = other RNA; note = pegRNA
gtgtaacctccatggctcaggttttagagctagaaatagcaagttaaaataaggctagtccgttatcaacttgaaaaagtggcaccgagtcggtgctgaggattgcagaatttgtttactgagccatggagg

SEQ ID NO: 4840 - RNA, 133 nt, synthetic construct
  source 1..133: mol_type = other RNA; note = pegRNA
gtgtaacctccatggctcaggttttagagctagaaatagcaagttaaaataaggctagtccgttatcaacttgaaaaagtggcaccgagtcggtgcagagtgaggattgcagaatttgttaactgagccatgg

SEQ ID NO: 4841 - RNA, 133 nt, synthetic construct
  source 1..133: mol_type = other RNA; note = pegRNA
gtgtaacctccatggctcaggttttagagctagaaatagcaagttaaaataaggctagtccgttatcaacttgaaaaagtggcaccgagtcggtgcagagtgaggattgcagaatttgttgactgagccatgg

SEQ ID NO: 4842 - RNA, 133 nt, synthetic construct
  source 1..133: mol_type = other RNA; note = pegRNA
gtgtaacctccatggctcaggttttagagctagaaatagcaagttaaaataaggctagtccgttatcaacttgaaaaagtggcaccgagtcggtgcagagtgaggattgcagaatttgtttactgagccatgg

SEQ ID NO: 4843 - RNA, 133 nt, synthetic construct
  source 1..133: mol_type = other RNA; note = pegRNA
gtgtaacctccatggctcaggttttagagctagaaatagcaagttaaaataaggctagtccgttatcaacttgaaaaagtggcaccgagtcggtgcaggattgcagaatttgttaactgagccatggaggtta

SEQ ID NO: 4844 - RNA, 133 nt, synthetic construct
  source 1..133: mol_type = other RNA; note = pegRNA
gtgtaacctccatggctcaggttttagagctagaaatagcaagttaaaataaggctagtccgttatcaacttgaaaaagtggcaccgagtcggtgcaggattgcagaatttgttaactgagccatggagtttt

SEQ ID NO: 4845 - RNA, 133 nt, synthetic construct
  source 1..133: mol_type = other RNA; note = pegRNA
gtgtaacctccatggctcaggttttagagctagaaatagcaagttaaaataaggctagtccgttatcaacttgaaaaagtggcaccgagtcggtgcaggattgcagaatttgttgactgagccatggaggtta

SEQ ID NO: 4846 - RNA, 133 nt, synthetic construct
  source 1..133: mol_type = other RNA; note = pegRNA
gtgtaacctccatggctcaggttttagagctagaaatagcaagttaaaataaggctagtccgttatcaacttgaaaaagtggcaccgagtcggtgcaggattgcagaatttgttgactgagccatggagtttt

SEQ ID NO: 4847 - RNA, 133 nt, synthetic construct
  source 1..133: mol_type = other RNA; note = pegRNA
gtgtaacctccatggctcaggttttagagctagaaatagcaagttaaaataaggctagtccgttatcaacttgaaaaagtggcaccgagtcggtgcaggattgcagaatttgtttactgagccatggaggtta

SEQ ID NO: 4848 - RNA, 133 nt, synthetic construct
  source 1..133: mol_type = other RNA; note = pegRNA
gtgtaacctccatggctcaggttttagagctagaaatagcaagttaaaataaggctagtccgttatcaacttgaaaaagtggcaccgagtcggtgcaggattgcagaatttgtttactgagccatggagtttt

SEQ ID NO: 4849 - RNA, 133 nt, synthetic construct
  source 1..133: mol_type = other RNA; note = pegRNA
gtgtaacctccatggctcaggttttagagctagaaatagcaagttaaaataaggctagtccgttatcaacttgaaaaagtggcaccgagtcggtgcagtgaggattgcagaatttgttaactgagccatggag

SEQ ID NO: 4850 - RNA, 133 nt, synthetic construct
  source 1..133: mol_type = other RNA; note = pegRNA
gtgtaacctccatggctcaggttttagagctagaaatagcaagttaaaataaggctagtccgttatcaacttgaaaaagtggcaccgagtcggtgcagtgaggattgcagaatttgttgactgagccatggag

SEQ ID NO: 4851 - RNA, 133 nt, synthetic construct
  source 1..133: mol_type = other RNA; note = pegRNA
gtgtaacctccatggctcaggttttagagctagaaatagcaagttaaaataaggctagtccgttatcaacttgaaaaagtggcaccgagtcggtgcagtgaggattgcagaatttgtttactgagccatggag

SEQ ID NO: 4852 - RNA, 133 nt, synthetic construct
  source 1..133: mol_type = other RNA; note = pegRNA
gtgtaacctccatggctcaggttttagagctagaaatagcaagttaaaataaggctagtccgttatcaacttgaaaaagtggcaccgagtcggtgcattgcagaatttgttaactgagccatggaggtttttt

SEQ ID NO: 4853 - RNA, 133 nt, synthetic construct
  source 1..133: mol_type = other RNA; note = pegRNA
gtgtaacctccatggctcaggttttagagctagaaatagcaagttaaaataaggctagtccgttatcaacttgaaaaagtggcaccgagtcggtgcattgcagaatttgttgactgagccatggaggtttttt

SEQ ID NO: 4854 - RNA, 133 nt, synthetic construct
  source 1..133: mol_type = other RNA; note = pegRNA
gtgtaacctccatggctcaggttttagagctagaaatagcaagttaaaataaggctagtccgttatcaacttgaaaaagtggcaccgagtcggtgcattgcagaatttgtttactgagccatggaggtttttt

SEQ ID NO: 4855 - RNA, 133 nt, synthetic construct
  source 1..133: mol_type = other RNA; note = pegRNA
gtgtaacctccatggctcaggttttagagctagaaatagcaagttaaaataaggctagtccgttatcaacttgaaaaagtggcaccgagtcggtgcgaggattgcagaatttgttaactgagccatggaggtt

SEQ ID NO: 4856 - RNA, 133 nt, synthetic construct
  source 1..133: mol_type = other RNA; note = pegRNA
gtgtaacctccatggctcaggttttagagctagaaatagcaagttaaaataaggctagtccgttatcaacttgaaaaagtggcaccgagtcggtgcgaggattgcagaatttgttaactgagccatggatttt

SEQ ID NO: 4857 - RNA, 133 nt, synthetic construct
  source 1..133: mol_type = other RNA; note = pegRNA
gtgtaacctccatggctcaggttttagagctagaaatagcaagttaaaataaggctagtccgttatcaacttgaaaaagtggcaccgagtcggtgcgaggattgcagaatttgttgactgagccatggaggtt

SEQ ID NO: 4858 - RNA, 133 nt, synthetic construct
  source 1..133: mol_type = other RNA; note = pegRNA
gtgtaacctccatggctcaggttttagagctagaaatagcaagttaaaataaggctagtccgttatcaacttgaaaaagtggcaccgagtcggtgcgaggattgcagaatttgttgactgagccatggatttt

SEQ ID NO: 4859 - RNA, 133 nt, synthetic construct
  source 1..133: mol_type = other RNA; note = pegRNA
gtgtaacctccatggctcaggttttagagctagaaatagcaagttaaaataaggctagtccgttatcaacttgaaaaagtggcaccgagtcggtgcgaggattgcagaatttgtttactgagccatggaggtt

SEQ ID NO: 4860 - RNA, 133 nt, synthetic construct
  source 1..133: mol_type = other RNA; note = pegRNA
gtgtaacctccatggctcaggttttagagctagaaatagcaagttaaaataaggctagtccgttatcaacttgaaaaagtggcaccgagtcggtgcgaggattgcagaatttgtttactgagccatggatttt

SEQ ID NO: 4861 - RNA, 133 nt, synthetic construct
  source 1..133: mol_type = other RNA; note = pegRNA
gtgtaacctccatggctcaggttttagagctagaaatagcaagttaaaataaggctagtccgttatcaacttgaaaaagtggcaccgagtcggtgcgagtgaggattgcagaatttgttaactgagccatgga

SEQ ID NO: 4862 - RNA, 133 nt, synthetic construct
  source 1..133: mol_type = other RNA; note = pegRNA
gtgtaacctccatggctcaggttttagagctagaaatagcaagttaaaataaggctagtccgttatcaacttgaaaaagtggcaccgagtcggtgcgagtgaggattgcagaatttgttgactgagccatgga

SEQ ID NO: 4863 - RNA, 133 nt, synthetic construct
  source 1..133: mol_type = other RNA; note = pegRNA
gtgtaacctccatggctcaggttttagagctagaaatagcaagttaaaataaggctagtccgttatcaacttgaaaaagtggcaccgagtcggtgcgagtgaggattgcagaatttgtttactgagccatgga

SEQ ID NO: 4864 - RNA, 133 nt, synthetic construct
  source 1..133: mol_type = other RNA; note = pegRNA
gtgtaacctccatggctcaggttttagagctagaaatagcaagttaaaataaggctagtccgttatcaacttgaaaaagtggcaccgagtcggtgcgattgcagaatttgttaactgagccatggaggttaca

SEQ ID NO: 4865 - RNA, 133 nt, synthetic construct
  source 1..133: mol_type = other RNA; note = pegRNA
gtgtaacctccatggctcaggttttagagctagaaatagcaagttaaaataaggctagtccgttatcaacttgaaaaagtggcaccgagtcggtgcgattgcagaatttgttaactgagccatggaggttttt

SEQ ID NO: 4866 - RNA, 133 nt, synthetic construct
  source 1..133: mol_type = other RNA; note = pegRNA
gtgtaacctccatggctcaggttttagagctagaaatagcaagttaaaataaggctagtccgttatcaacttgaaaaagtggcaccgagtcggtgcgattgcagaatttgttgactgagccatggaggttaca

SEQ ID NO: 4867 - RNA, 133 nt, synthetic construct
  source 1..133: mol_type = other RNA; note = pegRNA
gtgtaacctccatggctcaggttttagagctagaaatagcaagttaaaataaggctagtccgttatcaacttgaaaaagtggcaccgagtcggtgcgattgcagaatttgttgactgagccatggaggttttt

SEQ ID NO: 4868 - RNA, 133 nt, synthetic construct
  source 1..133: mol_type = other RNA; note = pegRNA
gtgtaacctccatggctcaggttttagagctagaaatagcaagttaaaataaggctagtccgttatcaacttgaaaaagtggcaccgagtcggtgcgattgcagaatttgtttactgagccatggaggttaca

SEQ ID NO: 4869 - RNA, 133 nt, synthetic construct
  source 1..133: mol_type = other RNA; note = pegRNA
gtgtaacctccatggctcaggttttagagctagaaatagcaagttaaaataaggctagtccgttatcaacttgaaaaagtggcaccgagtcggtgcgattgcagaatttgtttactgagccatggaggttttt

SEQ ID NO: 4870 - RNA, 133 nt, synthetic construct
  source 1..133: mol_type = other RNA; note = pegRNA
gtgtaacctccatggctcaggttttagagctagaaatagcaagttaaaataaggctagtccgttatcaacttgaaaaagtggcaccgagtcggtgcggattgcagaatttgttaactgagccatggaggttac

SEQ ID NO: 4871 - RNA, 133 nt, synthetic construct
  source 1..133: mol_type = other RNA; note = pegRNA
gtgtaacctccatggctcaggttttagagctagaaatagcaagttaaaataaggctagtccgttatcaacttgaaaaagtggcaccgagtcggtgcggattgcagaatttgttaactgagccatggaggtttt

SEQ ID NO: 4872 - RNA, 133 nt, synthetic construct
  source 1..133: mol_type = other RNA; note = pegRNA
gtgtaacctccatggctcaggttttagagctagaaatagcaagttaaaataaggctagtccgttatcaacttgaaaaagtggcaccgagtcggtgcggattgcagaatttgttgactgagccatggaggttac

SEQ ID NO: 4873 - RNA, 133 nt, synthetic construct
  source 1..133: mol_type = other RNA; note = pegRNA
gtgtaacctccatggctcaggttttagagctagaaatagcaagttaaaataaggctagtccgttatcaacttgaaaaagtggcaccgagtcggtgcggattgcagaatttgttgactgagccatggaggtttt

SEQ ID NO: 4874 - RNA, 133 nt, synthetic construct
  source 1..133: mol_type = other RNA; note = pegRNA
gtgtaacctccatggctcaggttttagagctagaaatagcaagttaaaataaggctagtccgttatcaacttgaaaaagtggcaccgagtcggtgcggattgcagaatttgtttactgagccatggaggttac

SEQ ID NO: 4875 - RNA, 133 nt, synthetic construct
  source 1..133: mol_type = other RNA; note = pegRNA
gtgtaacctccatggctcaggttttagagctagaaatagcaagttaaaataaggctagtccgttatcaacttgaaaaagtggcaccgagtcggtgcggattgcagaatttgtttactgagccatggaggtttt

SEQ ID NO: 4876 - RNA, 133 nt, synthetic construct
  source 1..133: mol_type = other RNA; note = pegRNA
gtgtaacctccatggctcaggttttagagctagaaatagcaagttaaaataaggctagtccgttatcaacttgaaaaagtggcaccgagtcggtgcgtgaggattgcagaatttgttaactgagccatggagg

SEQ ID NO: 4877 - RNA, 133 nt, synthetic construct
  source 1..133: mol_type = other RNA; note = pegRNA
gtgtaacctccatggctcaggttttagagctagaaatagcaagttaaaataaggctagtccgttatcaacttgaaaaagtggcaccgagtcggtgcgtgaggattgcagaatttgttgactgagccatggagg

SEQ ID NO: 4878 - RNA, 133 nt, synthetic construct
  source 1..133: mol_type = other RNA; note = pegRNA
gtgtaacctccatggctcaggttttagagctagaaatagcaagttaaaataaggctagtccgttatcaacttgaaaaagtggcaccgagtcggtgcgtgaggattgcagaatttgtttactgagccatggagg

SEQ ID NO: 4879 - RNA, 133 nt, synthetic construct
  source 1..133: mol_type = other RNA; note = pegRNA
gtgtaacctccatggctcaggttttagagctagaaatagcaagttaaaataaggctagtccgttatcaacttgaaaaagtggcaccgagtcggtgctgaggattgcagaatttgttaactgagccatggaggt

SEQ ID NO: 4880 - RNA, 133 nt, synthetic construct
  source 1..133: mol_type = other RNA; note = pegRNA
gtgtaacctccatggctcaggttttagagctagaaatagcaagttaaaataaggctagtccgttatcaacttgaaaaagtggcaccgagtcggtgctgaggattgcagaatttgttaactgagccatggtttt

SEQ ID NO: 4881 - RNA, 133 nt, synthetic construct
  source 1..133: mol_type = other RNA; note = pegRNA
gtgtaacctccatggctcaggttttagagctagaaatagcaagttaaaataaggctagtccgttatcaacttgaaaaagtggcaccgagtcggtgctgaggattgcagaatttgttgactgagccatggaggt

SEQ ID NO: 4882 - RNA, 133 nt, synthetic construct
  source 1..133: mol_type = other RNA; note = pegRNA
gtgtaacctccatggctcaggttttagagctagaaatagcaagttaaaataaggctagtccgttatcaacttgaaaaagtggcaccgagtcggtgctgaggattgcagaatttgttgactgagccatggtttt

SEQ ID NO: 4883 - RNA, 133 nt, synthetic construct
  source 1..133: mol_type = other RNA; note = pegRNA
gtgtaacctccatggctcaggttttagagctagaaatagcaagttaaaataaggctagtccgttatcaacttgaaaaagtggcaccgagtcggtgctgaggattgcagaatttgtttactgagccatggaggt

SEQ ID NO: 4884 - RNA, 133 nt, synthetic construct
  source 1..133: mol_type = other RNA; note = pegRNA
gtgtaacctccatggctcaggttttagagctagaaatagcaagttaaaataaggctagtccgttatcaacttgaaaaagtggcaccgagtcggtgctgaggattgcagaatttgtttactgagccatggtttt

SEQ ID NO: 4885 - RNA, 134 nt, synthetic construct
  source 1..134: mol_type = other RNA; note = pegRNA
gtgtaacctccatggctcaggttttagagctagaaatagcaagttaaaataaggctagtccgttatcaacttgaaaaagtggcaccgagtcggtgcagagtgaggattgcagaatttgttaactgagccatgga

SEQ ID NO: 4886 - RNA, 134 nt, synthetic construct
  source 1..134: mol_type = other RNA; note = pegRNA
gtgtaacctccatggctcaggttttagagctagaaatagcaagttaaaataaggctagtccgttatcaacttgaaaaagtggcaccgagtcggtgcagagtgaggattgcagaatttgttgactgagccatgga

SEQ ID NO: 4887 - RNA, 134 nt, synthetic construct
  source 1..134: mol_type = other RNA; note = pegRNA
gtgtaacctccatggctcaggttttagagctagaaatagcaagttaaaataaggctagtccgttatcaacttgaaaaagtggcaccgagtcggtgcagagtgaggattgcagaatttgtttactgagccatgga

SEQ ID NO: 4888 - RNA, 134 nt, synthetic construct
  source 1..134: mol_type = other RNA; note = pegRNA
gtgtaacctccatggctcaggttttagagctagaaatagcaagttaaaataaggctagtccgttatcaacttgaaaaagtggcaccgagtcggtgcaggattgcagaatttgttaactgagccatggaggttac

SEQ ID NO: 4889 - RNA, 134 nt, synthetic construct
  source 1..134: mol_type = other RNA; note = pegRNA
gtgtaacctccatggctcaggttttagagctagaaatagcaagttaaaataaggctagtccgttatcaacttgaaaaagtggcaccgagtcggtgcaggattgcagaatttgttaactgagccatggaggtttt

SEQ ID NO: 4890 - RNA, 134 nt, synthetic construct
  source 1..134: mol_type = other RNA; note = pegRNA
gtgtaacctccatggctcaggttttagagctagaaatagcaagttaaaataaggctagtccgttatcaacttgaaaaagtggcaccgagtcggtgcaggattgcagaatttgttgactgagccatggaggttac

SEQ ID NO: 4891 - RNA, 134 nt, synthetic construct
  source 1..134: mol_type = other RNA; note = pegRNA
gtgtaacctccatggctcaggttttagagctagaaatagcaagttaaaataaggctagtccgttatcaacttgaaaaagtggcaccgagtcggtgcaggattgcagaatttgttgactgagccatggaggtttt

SEQ ID NO: 4892 - RNA, 134 nt, synthetic construct
  source 1..134: mol_type = other RNA; note = pegRNA
gtgtaacctccatggctcaggttttagagctagaaatagcaagttaaaataaggctagtccgttatcaacttgaaaaagtggcaccgagtcggtgcaggattgcagaatttgtttactgagccatggaggttac

SEQ ID NO: 4893 - RNA, 134 nt, synthetic construct
  source 1..134: mol_type = other RNA; note = pegRNA
gtgtaacctccatggctcaggttttagagctagaaatagcaagttaaaataaggctagtccgttatcaacttgaaaaagtggcaccgagtcggtgcaggattgcagaatttgtttactgagccatggaggtttt

SEQ ID NO: 4894 - RNA, 134 nt, synthetic construct
  source 1..134: mol_type = other RNA; note = pegRNA
gtgtaacctccatggctcaggttttagagctagaaatagcaagttaaaataaggctagtccgttatcaacttgaaaaagtggcaccgagtcggtgcagtgaggattgcagaatttgttaactgagccatggagg

SEQ ID NO: 4895 - RNA, 134 nt, synthetic construct
  source 1..134: mol_type = other RNA; note = pegRNA
gtgtaacctccatggctcaggttttagagctagaaatagcaagttaaaataaggctagtccgttatcaacttgaaaaagtggcaccgagtcggtgcagtgaggattgcagaatttgttgactgagccatggagg

SEQ ID NO: 4896 - RNA, 134 nt, synthetic construct
  source 1..134: mol_type = other RNA; note = pegRNA
gtgtaacctccatggctcaggttttagagctagaaatagcaagttaaaataaggctagtccgttatcaacttgaaaaagtggcaccgagtcggtgcagtgaggattgcagaatttgtttactgagccatggagg

SEQ ID NO: 4897 - RNA, 134 nt, synthetic construct
  source 1..134: mol_type = other RNA; note = pegRNA
gtgtaacctccatggctcaggttttagagctagaaatagcaagttaaaataaggctagtccgttatcaacttgaaaaagtggcaccgagtcggtgcattgcagaatttgttaactgagccatggaggttatttt

SEQ ID NO: 4898 - RNA, 134 nt, synthetic construct
  source 1..134: mol_type = other RNA; note = pegRNA
gtgtaacctccatggctcaggttttagagctagaaatagcaagttaaaataaggctagtccgttatcaacttgaaaaagtggcaccgagtcggtgcattgcagaatttgttcactgagccatggaggttatttt

SEQ ID NO: 4899 - RNA, 134 nt, synthetic construct
  source 1..134: mol_type = other RNA; note = pegRNA
gtgtaacctccatggctcaggttttagagctagaaatagcaagttaaaataaggctagtccgttatcaacttgaaaaagtggcaccgagtcggtgcattgcagaatttgttgactgagccatggaggttatttt

SEQ ID NO: 4900 - RNA, 134 nt, synthetic construct
  source 1..134: mol_type = other RNA; note = pegRNA
gtgtaacctccatggctcaggttttagagctagaaatagcaagttaaaataaggctagtccgttatcaacttgaaaaagtggcaccgagtcggtgcattgcagaatttgtttactgagccatggaggttatttt

SEQ ID NO: 4901 - RNA, 134 nt, synthetic construct
  source 1..134: mol_type = other RNA; note = pegRNA
gtgtaacctccatggctcaggttttagagctagaaatagcaagttaaaataaggctagtccgttatcaacttgaaaaagtggcaccgagtcggtgccagagtgaggattgcagaatttgttaactgagccatgg

SEQ ID NO: 4902 - RNA, 134 nt, synthetic construct
  source 1..134: mol_type = other RNA; note = pegRNA
gtgtaacctccatggctcaggttttagagctagaaatagcaagttaaaataaggctagtccgttatcaacttgaaaaagtggcaccgagtcggtgccagagtgaggattgcagaatttgttgactgagccatgg

SEQ ID NO: 4903 - RNA, 134 nt, synthetic construct
  source 1..134: mol_type = other RNA; note = pegRNA
gtgtaacctccatggctcaggttttagagctagaaatagcaagttaaaataaggctagtccgttatcaacttgaaaaagtggcaccgagtcggtgccagagtgaggattgcagaatttgtttactgagccatgg

SEQ ID NO: 4904 - RNA, 134 nt, synthetic construct
  source 1..134: mol_type = other RNA; note = pegRNA
gtgtaacctccatggctcaggttttagagctagaaatagcaagttaaaataaggctagtccgttatcaacttgaaaaagtggcaccgagtcggtgcgaggattgcagaatttgttaactgagccatggaggtta

SEQ ID NO: 4905 - RNA, 134 nt, synthetic construct
  source 1..134: mol_type = other RNA; note = pegRNA
gtgtaacctccatggctcaggttttagagctagaaatagcaagttaaaataaggctagtccgttatcaacttgaaaaagtggcaccgagtcggtgcgaggattgcagaatttgttaactgagccatggagtttt

SEQ ID NO: 4906 - RNA, 134 nt, synthetic construct
  source 1..134: mol_type = other RNA; note = pegRNA
gtgtaacctccatggctcaggttttagagctagaaatagcaagttaaaataaggctagtccgttatcaacttgaaaaagtggcaccgagtcggtgcgaggattgcagaatttgttcactgagccatggaggtta

SEQ ID NO: 4907 - RNA, 134 nt, synthetic construct
  source 1..134: mol_type = other RNA; note = pegRNA
gtgtaacctccatggctcaggttttagagctagaaatagcaagttaaaataaggctagtccgttatcaacttgaaaaagtggcaccgagtcggtgcgaggattgcagaatttgttcactgagccatggagtttt

SEQ ID NO: 4908 - RNA, 134 nt, synthetic construct
  source 1..134: mol_type = other RNA; note = pegRNA
gtgtaacctccatggctcaggttttagagctagaaatagcaagttaaaataaggctagtccgttatcaacttgaaaaagtggcaccgagtcggtgcgaggattgcagaatttgttgactgagccatggaggtta

SEQ ID NO: 4909 - RNA, 134 nt, synthetic construct
  source 1..134: mol_type = other RNA; note = pegRNA
gtgtaacctccatggctcaggttttagagctagaaatagcaagttaaaataaggctagtccgttatcaacttgaaaaagtggcaccgagtcggtgcgaggattgcagaatttgttgactgagccatggagtttt

SEQ ID NO: 4910 - RNA, 134 nt, synthetic construct
  source 1..134: mol_type = other RNA; note = pegRNA
gtgtaacctccatggctcaggttttagagctagaaatagcaagttaaaataaggctagtccgttatcaacttgaaaaagtggcaccgagtcggtgcgaggattgcagaatttgtttactgagccatggaggtta

SEQ ID NO: 4911 - RNA, 134 nt, synthetic construct
  source 1..134: mol_type = other RNA; note = pegRNA
gtgtaacctccatggctcaggttttagagctagaaatagcaagttaaaataaggctagtccgttatcaacttgaaaaagtggcaccgagtcggtgcgaggattgcagaatttgtttactgagccatggagtttt

SEQ ID NO: 4912 - RNA, 134 nt, synthetic construct
  source 1..134: mol_type = other RNA; note = pegRNA
gtgtaacctccatggctcaggttttagagctagaaatagcaagttaaaataaggctagtccgttatcaacttgaaaaagtggcaccgagtcggtgcgagtgaggattgcagaatttgttaactgagccatggag

SEQ ID NO: 4913 - RNA, 134 nt, synthetic construct
  source 1..134: mol_type = other RNA; note = pegRNA
gtgtaacctccatggctcaggttttagagctagaaatagcaagttaaaataaggctagtccgttatcaacttgaaaaagtggcaccgagtcggtgcgagtgaggattgcagaatttgttgactgagccatggag

SEQ ID NO: 4914 - RNA, 134 nt, synthetic construct
  source 1..134: mol_type = other RNA; note = pegRNA
gtgtaacctccatggctcaggttttagagctagaaatagcaagttaaaataaggctagtccgttatcaacttgaaaaagtggcaccgagtcggtgcgagtgaggattgcagaatttgtttactgagccatggag

SEQ ID NO: 4915 - RNA, 134 nt, synthetic construct
  source 1..134: mol_type = other RNA; note = pegRNA
gtgtaacctccatggctcaggttttagagctagaaatagcaagttaaaataaggctagtccgttatcaacttgaaaaagtggcaccgagtcggtgcgattgcagaatttgttaactgagccatggaggtttttt

SEQ ID NO: 4916 - RNA, 134 nt, synthetic construct
  source 1..134: mol_type = other RNA; note = pegRNA
gtgtaacctccatggctcaggttttagagctagaaatagcaagttaaaataaggctagtccgttatcaacttgaaaaagtggcaccgagtcggtgcgattgcagaatttgttgactgagccatggaggtttttt

SEQ ID NO: 4917 - RNA, 134 nt, synthetic construct
  source 1..134: mol_type = other RNA; note = pegRNA
gtgtaacctccatggctcaggttttagagctagaaatagcaagttaaaataaggctagtccgttatcaacttgaaaaagtggcaccgagtcggtgcgattgcagaatttgtttactgagccatggaggtttttt

SEQ ID NO: 4918 - RNA, 134 nt, synthetic construct
  source 1..134: mol_type = other RNA; note = pegRNA
gtgtaacctccatggctcaggttttagagctagaaatagcaagttaaaataaggctagtccgttatcaacttgaaaaagtggcaccgagtcggtgcggattgcagaatttgttaactgagccatggaggttaca

SEQ ID NO: 4919 - RNA, 134 nt, synthetic construct
  source 1..134: mol_type = other RNA; note = pegRNA
gtgtaacctccatggctcaggttttagagctagaaatagcaagttaaaataaggctagtccgttatcaacttgaaaaagtggcaccgagtcggtgcggattgcagaatttgttaactgagccatggaggttttt

SEQ ID NO: 4920 - RNA, 134 nt, synthetic construct
  source 1..134: mol_type = other RNA; note = pegRNA
gtgtaacctccatggctcaggttttagagctagaaatagcaagttaaaataaggctagtccgttatcaacttgaaaaagtggcaccgagtcggtgcggattgcagaatttgttcactgagccatggaggttttt

SEQ ID NO: 4921 - RNA, 134 nt, synthetic construct
  source 1..134: mol_type = other RNA; note = pegRNA
gtgtaacctccatggctcaggttttagagctagaaatagcaagttaaaataaggctagtccgttatcaacttgaaaaagtggcaccgagtcggtgcggattgcagaatttgttgactgagccatggaggttaca

SEQ ID NO: 4922 - RNA, 134 nt, synthetic construct
  source 1..134: mol_type = other RNA; note = pegRNA
gtgtaacctccatggctcaggttttagagctagaaatagcaagttaaaataaggctagtccgttatcaacttgaaaaagtggcaccgagtcggtgcggattgcagaatttgttgactgagccatggaggttttt

SEQ ID NO: 4923 - RNA, 134 nt, synthetic construct
  source 1..134: mol_type = other RNA; note = pegRNA
gtgtaacctccatggctcaggttttagagctagaaatagcaagttaaaataaggctagtccgttatcaacttgaaaaagtggcaccgagtcggtgcggattgcagaatttgtttactgagccatggaggttaca

SEQ ID NO: 4924 - RNA, 134 nt, synthetic construct
  source 1..134: mol_type = other RNA; note = pegRNA
gtgtaacctccatggctcaggttttagagctagaaatagcaagttaaaataaggctagtccgttatcaacttgaaaaagtggcaccgagtcggtgcggattgcagaatttgtttactgagccatggaggttttt

SEQ ID NO: 4925 - RNA, 134 nt, synthetic construct
  source 1..134: mol_type = other RNA; note = pegRNA
gtgtaacctccatggctcaggttttagagctagaaatagcaagttaaaataaggctagtccgttatcaacttgaaaaagtggcaccgagtcggtgcgtgaggattgcagaatttgttaactgagccatggaggt

SEQ ID NO: 4926 - RNA, 134 nt, synthetic construct
  source 1..134: mol_type = other RNA; note = pegRNA
gtgtaacctccatggctcaggttttagagctagaaatagcaagttaaaataaggctagtccgttatcaacttgaaaaagtggcaccgagtcggtgcgtgaggattgcagaatttgttaactgagccatggtttt

SEQ ID NO: 4927 - RNA, 134 nt, synthetic construct
  source 1..134: mol_type = other RNA; note = pegRNA
gtgtaacctccatggctcaggttttagagctagaaatagcaagttaaaataaggctagtccgttatcaacttgaaaaagtggcaccgagtcggtgcgtgaggattgcagaatttgttcactgagccatggaggt

SEQ ID NO: 4928 - RNA, 134 nt, synthetic construct
  source 1..134: mol_type = other RNA; note = pegRNA
gtgtaacctccatggctcaggttttagagctagaaatagcaagttaaaataaggctagtccgttatcaacttgaaaaagtggcaccgagtcggtgcgtgaggattgcagaatttgttcactgagccatggtttt

SEQ ID NO: 4929 - RNA, 134 nt, synthetic construct
  source 1..134: mol_type = other RNA; note = pegRNA
gtgtaacctccatggctcaggttttagagctagaaatagcaagttaaaataaggctagtccgttatcaacttgaaaaagtggcaccgagtcggtgcgtgaggattgcagaatttgttgactgagccatggaggt

SEQ ID NO: 4930 - RNA, 134 nt, synthetic construct
  source 1..134: mol_type = other RNA; note = pegRNA
gtgtaacctccatggctcaggttttagagctagaaatagcaagttaaaataaggctagtccgttatcaacttgaaaaagtggcaccgagtcggtgcgtgaggattgcagaatttgttgactgagccatggtttt

SEQ ID NO: 4931 - RNA, 134 nt, synthetic construct
  source 1..134: mol_type = other RNA; note = pegRNA
gtgtaacctccatggctcaggttttagagctagaaatagcaagttaaaataaggctagtccgttatcaacttgaaaaagtggcaccgagtcggtgcgtgaggattgcagaatttgtttactgagccatggaggt

SEQ ID NO: 4932 - RNA, 134 nt, synthetic construct
  source 1..134: mol_type = other RNA; note = pegRNA
gtgtaacctccatggctcaggttttagagctagaaatagcaagttaaaataaggctagtccgttatcaacttgaaaaagtggcaccgagtcggtgcgtgaggattgcagaatttgtttactgagccatggtttt

SEQ ID NO: 4933 - RNA, 134 nt, synthetic construct
  source 1..134: mol_type = other RNA; note = pegRNA
gtgtaacctccatggctcaggttttagagctagaaatagcaagttaaaataaggctagtccgttatcaacttgaaaaagtggcaccgagtcggtgctgaggattgcagaatttgttaactgagccatggaggtt

SEQ ID NO: 4934 - RNA, 134 nt, synthetic construct
  source 1..134: mol_type = other RNA; note = pegRNA
gtgtaacctccatggctcaggttttagagctagaaatagcaagttaaaataaggctagtccgttatcaacttgaaaaagtggcaccgagtcggtgctgaggattgcagaatttgttaactgagccatggatttt

SEQ ID NO: 4935 - RNA, 134 nt, synthetic construct
  source 1..134: mol_type = other RNA; note = pegRNA
gtgtaacctccatggctcaggttttagagctagaaatagcaagttaaaataaggctagtccgttatcaacttgaaaaagtggcaccgagtcggtgctgaggattgcagaatttgttgactgagccatggaggtt

SEQ ID NO: 4936 - RNA, 134 nt, synthetic construct
  source 1..134: mol_type = other RNA; note = pegRNA
gtgtaacctccatggctcaggttttagagctagaaatagcaagttaaaataaggctagtccgttatcaacttgaaaaagtggcaccgagtcggtgctgaggattgcagaatttgttgactgagccatggatttt

SEQ ID NO: 4937 - RNA, 134 nt, synthetic construct
  source 1..134: mol_type = other RNA; note = pegRNA
gtgtaacctccatggctcaggttttagagctagaaatagcaagttaaaataaggctagtccgttatcaacttgaaaaagtggcaccgagtcggtgctgaggattgcagaatttgtttactgagccatggaggtt

SEQ ID NO: 4938 - RNA, 134 nt, synthetic construct
  source 1..134: mol_type = other RNA; note = pegRNA
gtgtaacctccatggctcaggttttagagctagaaatagcaagttaaaataaggctagtccgttatcaacttgaaaaagtggcaccgagtcggtgctgaggattgcagaatttgtttactgagccatggatttt

SEQ ID NO: 4939 - RNA, 135 nt, synthetic construct
  source 1..135: mol_type = other RNA; note = pegRNA
gtgtaacctccatggctcaggttttagagctagaaatagcaagttaaaataaggctagtccgttatcaacttgaaaaagtggcaccgagtcggtgcagagtgaggattgcagaatttgttaactgagccatggag

SEQ ID NO: 4940 - RNA, 135 nt, synthetic construct
  source 1..135: mol_type = other RNA; note = pegRNA
gtgtaacctccatggctcaggttttagagctagaaatagcaagttaaaataaggctagtccgttatcaacttgaaaaagtggcaccgagtcggtgcagagtgaggattgcagaatttgttgactgagccatggag

SEQ ID NO: 4941 - RNA, 135 nt, synthetic construct
  source 1..135: mol_type = other RNA; note = pegRNA
gtgtaacctccatggctcaggttttagagctagaaatagcaagttaaaataaggctagtccgttatcaacttgaaaaagtggcaccgagtcggtgcagagtgaggattgcagaatttgtttactgagccatggag

SEQ ID NO: 4942 - RNA, 135 nt, synthetic construct
  source 1..135: mol_type = other RNA; note = pegRNA
gtgtaacctccatggctcaggttttagagctagaaatagcaagttaaaataaggctagtccgttatcaacttgaaaaagtggcaccgagtcggtgcaggattgcagaatttgttaactgagccatggaggttaca

SEQ ID NO: 4943 - RNA, 135 nt, synthetic construct
  source 1..135: mol_type = other RNA; note = pegRNA
gtgtaacctccatggctcaggttttagagctagaaatagcaagttaaaataaggctagtccgttatcaacttgaaaaagtggcaccgagtcggtgcaggattgcagaatttgttaactgagccatggaggttttt

SEQ ID NO: 4944 - RNA, 135 nt, synthetic construct
  source 1..135: mol_type = other RNA; note = pegRNA
gtgtaacctccatggctcaggttttagagctagaaatagcaagttaaaataaggctagtccgttatcaacttgaaaaagtggcaccgagtcggtgcaggattgcagaatttgttgactgagccatggaggttaca

SEQ ID NO: 4945 - RNA, 135 nt, synthetic construct
  source 1..135: mol_type = other RNA; note = pegRNA
gtgtaacctccatggctcaggttttagagctagaaatagcaagttaaaataaggctagtccgttatcaacttgaaaaagtggcaccgagtcggtgcaggattgcagaatttgttgactgagccatggaggttttt

SEQ ID NO: 4946 - RNA, 135 nt, synthetic construct
  source 1..135: mol_type = other RNA; note = pegRNA
gtgtaacctccatggctcaggttttagagctagaaatagcaagttaaaataaggctagtccgttatcaacttgaaaaagtggcaccgagtcggtgcaggattgcagaatttgtttactgagccatggaggttaca

SEQ ID NO: 4947 - RNA, 135 nt, synthetic construct
  source 1..135: mol_type = other RNA; note = pegRNA
gtgtaacctccatggctcaggttttagagctagaaatagcaagttaaaataaggctagtccgttatcaacttgaaaaagtggcaccgagtcggtgcaggattgcagaatttgtttactgagccatggaggttttt

SEQ ID NO: 4948 - RNA, 135 nt, synthetic construct
  source 1..135: mol_type = other RNA; note = pegRNA
gtgtaacctccatggctcaggttttagagctagaaatagcaagttaaaataaggctagtccgttatcaacttgaaaaagtggcaccgagtcggtgcagtgaggattgcagaatttgttaactgagccatggaggt

SEQ ID NO: 4949 - RNA, 135 nt, synthetic construct
  source 1..135: mol_type = other RNA; note = pegRNA
gtgtaacctccatggctcaggttttagagctagaaatagcaagttaaaataaggctagtccgttatcaacttgaaaaagtggcaccgagtcggtgcagtgaggattgcagaatttgttaactgagccatggtttt

SEQ ID NO: 4950 - RNA, 135 nt, synthetic construct
  source 1..135: mol_type = other RNA; note = pegRNA
gtgtaacctccatggctcaggttttagagctagaaatagcaagttaaaataaggctagtccgttatcaacttgaaaaagtggcaccgagtcggtgcagtgaggattgcagaatttgttgactgagccatggaggt

SEQ ID NO: 4951 - RNA, 135 nt, synthetic construct
  source 1..135: mol_type = other RNA; note = pegRNA
gtgtaacctccatggctcaggttttagagctagaaatagcaagttaaaataaggctagtccgttatcaacttgaaaaagtggcaccgagtcggtgcagtgaggattgcagaatttgttgactgagccatggtttt

SEQ ID NO: 4952 - RNA, 135 nt, synthetic construct
  source 1..135: mol_type = other RNA; note = pegRNA
gtgtaacctccatggctcaggttttagagctagaaatagcaagttaaaataaggctagtccgttatcaacttgaaaaagtggcaccgagtcggtgcagtgaggattgcagaatttgtttactgagccatggaggt

SEQ ID NO: 4953 - RNA, 135 nt, synthetic construct
  source 1..135: mol_type = other RNA; note = pegRNA
gtgtaacctccatggctcaggttttagagctagaaatagcaagttaaaataaggctagtccgttatcaacttgaaaaagtggcaccgagtcggtgcagtgaggattgcagaatttgtttactgagccatggtttt

SEQ ID NO: 4954 - RNA, 135 nt, synthetic construct
  source 1..135: mol_type = other RNA; note = pegRNA
gtgtaacctccatggctcaggttttagagctagaaatagcaagttaaaataaggctagtccgttatcaacttgaaaaagtggcaccgagtcggtgcattgcagaatttgttaactgagccatggaggttactttt

SEQ ID NO: 4955 - RNA, 135 nt, synthetic construct
  source 1..135: mol_type = other RNA; note = pegRNA
gtgtaacctccatggctcaggttttagagctagaaatagcaagttaaaataaggctagtccgttatcaacttgaaaaagtggcaccgagtcggtgcattgcagaatttgttgactgagccatggaggttactttt

SEQ ID NO: 4956 - RNA, 135 nt, synthetic construct
  source 1..135: mol_type = other RNA; note = pegRNA
gtgtaacctccatggctcaggttttagagctagaaatagcaagttaaaataaggctagtccgttatcaacttgaaaaagtggcaccgagtcggtgcattgcagaatttgtttactgagccatggaggttactttt

SEQ ID NO: 4957 - RNA, 135 nt, synthetic construct
  source 1..135: mol_type = other RNA; note = pegRNA
gtgtaacctccatggctcaggttttagagctagaaatagcaagttaaaataaggctagtccgttatcaacttgaaaaagtggcaccgagtcggtgccagagtgaggattgcagaatttgttaactgagccatgga

SEQ ID NO: 4958 - RNA, 135 nt, synthetic construct
  source 1..135: mol_type = other RNA; note = pegRNA
gtgtaacctccatggctcaggttttagagctagaaatagcaagttaaaataaggctagtccgttatcaacttgaaaaagtggcaccgagtcggtgccagagtgaggattgcagaatttgttgactgagccatgga

SEQ ID NO: 4959 - RNA, 135 nt, synthetic construct
  source 1..135: mol_type = other RNA; note = pegRNA
gtgtaacctccatggctcaggttttagagctagaaatagcaagttaaaataaggctagtccgttatcaacttgaaaaagtggcaccgagtcggtgccagagtgaggattgcagaatttgtttactgagccatgga

SEQ ID NO: 4960 - RNA, 135 nt, synthetic construct
  source 1..135: mol_type = other RNA; note = pegRNA
gtgtaacctccatggctcaggttttagagctagaaatagcaagttaaaataaggctagtccgttatcaacttgaaaaagtggcaccgagtcggtgcccagagtgaggattgcagaatttgttaactgagccatgg

SEQ ID NO: 4961 - RNA, 135 nt, synthetic construct
  source 1..135: mol_type = other RNA; note = pegRNA
gtgtaacctccatggctcaggttttagagctagaaatagcaagttaaaataaggctagtccgttatcaacttgaaaaagtggcaccgagtcggtgcccagagtgaggattgcagaatttgttgactgagccatgg

SEQ ID NO: 4962 - RNA, 135 nt, synthetic construct
  source 1..135: mol_type = other RNA; note = pegRNA
gtgtaacctccatggctcaggttttagagctagaaatagcaagttaaaataaggctagtccgttatcaacttgaaaaagtggcaccgagtcggtgcccagagtgaggattgcagaatttgtttactgagccatgg

SEQ ID NO: 4963 - RNA, 135 nt, synthetic construct
  source 1..135: mol_type = other RNA; note = pegRNA
gtgtaacctccatggctcaggttttagagctagaaatagcaagttaaaataaggctagtccgttatcaacttgaaaaagtggcaccgagtcggtgcgaggattgcagaatttgttaactgagccatggaggttac

SEQ ID NO: 4964 - RNA, 135 nt, synthetic construct
  source 1..135: mol_type = other RNA; note = pegRNA
gtgtaacctccatggctcaggttttagagctagaaatagcaagttaaaataaggctagtccgttatcaacttgaaaaagtggcaccgagtcggtgcgaggattgcagaatttgttaactgagccatggaggtttt

SEQ ID NO: 4965 - RNA, 135 nt, synthetic construct
  source 1..135: mol_type = other RNA; note = pegRNA
gtgtaacctccatggctcaggttttagagctagaaatagcaagttaaaataaggctagtccgttatcaacttgaaaaagtggcaccgagtcggtgcgaggattgcagaatttgttgactgagccatggaggttac

SEQ ID NO: 4966 - RNA, 135 nt, synthetic construct
  source 1..135: mol_type = other RNA; note = pegRNA
gtgtaacctccatggctcaggttttagagctagaaatagcaagttaaaataaggctagtccgttatcaacttgaaaaagtggcaccgagtcggtgcgaggattgcagaatttgttgactgagccatggaggtttt

SEQ ID NO: 4967 - RNA, 135 nt, synthetic construct
  source 1..135: mol_type = other RNA; note = pegRNA
gtgtaacctccatggctcaggttttagagctagaaatagcaagttaaaataaggctagtccgttatcaacttgaaaaagtggcaccgagtcggtgcgaggattgcagaatttgtttactgagccatggaggttac

SEQ ID NO: 4968 - RNA, 135 nt, synthetic construct
  source 1..135: mol_type = other RNA; note = pegRNA
gtgtaacctccatggctcaggttttagagctagaaatagcaagttaaaataaggctagtccgttatcaacttgaaaaagtggcaccgagtcggtgcgaggattgcagaatttgtttactgagccatggaggtttt

SEQ ID NO: 4969 - RNA, 135 nt, synthetic construct
  source 1..135: mol_type = other RNA; note = pegRNA
gtgtaacctccatggctcaggttttagagctagaaatagcaagttaaaataaggctagtccgttatcaacttgaaaaagtggcaccgagtcggtgcgagtgaggattgcagaatttgttaactgagccatggagg

SEQ ID NO: 4970 - RNA, 135 nt, synthetic construct
  source 1..135: mol_type = other RNA; note = pegRNA
gtgtaacctccatggctcaggttttagagctagaaatagcaagttaaaataaggctagtccgttatcaacttgaaaaagtggcaccgagtcggtgcgagtgaggattgcagaatttgttgactgagccatggagg

SEQ ID NO: 4971 - RNA, 135 nt, synthetic construct
  source 1..135: mol_type = other RNA; note = pegRNA
gtgtaacctccatggctcaggttttagagctagaaatagcaagttaaaataaggctagtccgttatcaacttgaaaaagtggcaccgagtcggtgcgagtgaggattgcagaatttgtttactgagccatggagg

SEQ ID NO: 4972 - RNA, 135 nt, synthetic construct
  source 1..135: mol_type = other RNA; note = pegRNA
gtgtaacctccatggctcaggttttagagctagaaatagcaagttaaaataaggctagtccgttatcaacttgaaaaagtggcaccgagtcggtgcgattgcagaatttgttaactgagccatggaggttatttt

SEQ ID NO: 4973 - RNA, 135 nt, synthetic construct
  source 1..135: mol_type = other RNA; note = pegRNA
gtgtaacctccatggctcaggttttagagctagaaatagcaagttaaaataaggctagtccgttatcaacttgaaaaagtggcaccgagtcggtgcgattgcagaatttgttgactgagccatggaggttatttt

SEQ ID NO: 4974 - RNA, 135 nt, synthetic construct
  source 1..135: mol_type = other RNA; note = pegRNA
gtgtaacctccatggctcaggttttagagctagaaatagcaagttaaaataaggctagtccgttatcaacttgaaaaagtggcaccgagtcggtgcgattgcagaatttgtttactgagccatggaggttatttt

SEQ ID NO: 4975 - RNA, 135 nt, synthetic construct
  source 1..135: mol_type = other RNA; note = pegRNA
gtgtaacctccatggctcaggttttagagctagaaatagcaagttaaaataaggctagtccgttatcaacttgaaaaagtggcaccgagtcggtgcggattgcagaatttgttaactgagccatggaggtttttt

SEQ ID NO: 4976 - RNA, 135 nt, synthetic construct
  source 1..135: mol_type = other RNA; note = pegRNA
gtgtaacctccatggctcaggttttagagctagaaatagcaagttaaaataaggctagtccgttatcaacttgaaaaagtggcaccgagtcggtgcggattgcagaatttgttgactgagccatggaggtttttt

SEQ ID NO: 4977 - RNA, 135 nt, synthetic construct
  source 1..135: mol_type = other RNA; note = pegRNA
gtgtaacctccatggctcaggttttagagctagaaatagcaagttaaaataaggctagtccgttatcaacttgaaaaagtggcaccgagtcggtgcggattgcagaatttgtttactgagccatggaggtttttt

SEQ ID NO: 4978 - RNA, 135 nt, synthetic construct
  source 1..135: mol_type = other RNA; note = pegRNA
gtgtaacctccatggctcaggttttagagctagaaatagcaagttaaaataaggctagtccgttatcaacttgaaaaagtggcaccgagtcggtgcgtgaggattgcagaatttgttaactgagccatggaggtt

SEQ ID NO: 4979 - RNA, 135 nt, synthetic construct
  source 1..135: mol_type = other RNA; note = pegRNA
gtgtaacctccatggctcaggttttagagctagaaatagcaagttaaaataaggctagtccgttatcaacttgaaaaagtggcaccgagtcggtgcgtgaggattgcagaatttgttaactgagccatggatttt

SEQ ID NO: 4980 - RNA, 135 nt, synthetic construct
  source 1..135: mol_type = other RNA; note = pegRNA
gtgtaacctccatggctcaggttttagagctagaaatagcaagttaaaataaggctagtccgttatcaacttgaaaaagtggcaccgagtcggtgcgtgaggattgcagaatttgttgactgagccatggaggtt

SEQ ID NO: 4981 - RNA, 135 nt, synthetic construct
  source 1..135: mol_type = other RNA; note = pegRNA
gtgtaacctccatggctcaggttttagagctagaaatagcaagttaaaataaggctagtccgttatcaacttgaaaaagtggcaccgagtcggtgcgtgaggattgcagaatttgttgactgagccatggatttt

SEQ ID NO: 4982 - RNA, 135 nt, synthetic construct
  source 1..135: mol_type = other RNA; note = pegRNA
gtgtaacctccatggctcaggttttagagctagaaatagcaagttaaaataaggctagtccgttatcaacttgaaaaagtggcaccgagtcggtgcgtgaggattgcagaatttgtttactgagccatggaggtt

SEQ ID NO: 4983 - RNA, 135 nt, synthetic construct
  source 1..135: mol_type = other RNA; note = pegRNA
gtgtaacctccatggctcaggttttagagctagaaatagcaagttaaaataaggctagtccgttatcaacttgaaaaagtggcaccgagtcggtgcgtgaggattgcagaatttgtttactgagccatggatttt

SEQ ID NO: 4984 - RNA, 135 nt, synthetic construct
  source 1..135: mol_type = other RNA; note = pegRNA
gtgtaacctccatggctcaggttttagagctagaaatagcaagttaaaataaggctagtccgttatcaacttgaaaaagtggcaccgagtcggtgctgaggattgcagaatttgttaactgagccatggaggtta

SEQ ID NO: 4985 - RNA, 135 nt, synthetic construct
  source 1..135: mol_type = other RNA; note = pegRNA
gtgtaacctccatggctcaggttttagagctagaaatagcaagttaaaataaggctagtccgttatcaacttgaaaaagtggcaccgagtcggtgctgaggattgcagaatttgttaactgagccatggagtttt

SEQ ID NO: 4986 - RNA, 135 nt, synthetic construct
  source 1..135: mol_type = other RNA; note = pegRNA
gtgtaacctccatggctcaggttttagagctagaaatagcaagttaaaataaggctagtccgttatcaacttgaaaaagtggcaccgagtcggtgctgaggattgcagaatttgttgactgagccatggaggtta

SEQ ID NO: 4987 - RNA, 135 nt, synthetic construct
  source 1..135: mol_type = other RNA; note = pegRNA
gtgtaacctccatggctcaggttttagagctagaaatagcaagttaaaataaggctagtccgttatcaacttgaaaaagtggcaccgagtcggtgctgaggattgcagaatttgttgactgagccatggagtttt

SEQ ID NO: 4988 - RNA, 135 nt, synthetic construct
  source 1..135: mol_type = other RNA; note = pegRNA
gtgtaacctccatggctcaggttttagagctagaaatagcaagttaaaataaggctagtccgttatcaacttgaaaaagtggcaccgagtcggtgctgaggattgcagaatttgtttactgagccatggaggtta

SEQ ID NO: 4989 - RNA, 135 nt, synthetic construct
  source 1..135: mol_type = other RNA; note = pegRNA
gtgtaacctccatggctcaggttttagagctagaaatagcaagttaaaataaggctagtccgttatcaacttgaaaaagtggcaccgagtcggtgctgaggattgcagaatttgtttactgagccatggagtttt

SEQ ID NO: 4990 - RNA, 136 nt, synthetic construct
  source 1..136: mol_type = other RNA; note = pegRNA
gtgtaacctccatggctcaggttttagagctagaaatagcaagttaaaataaggctagtccgttatcaacttgaaaaagtggcaccgagtcggtgcagagtgaggattgcagaatttgttaactgagccatggagg

SEQ ID NO: 4991 - RNA, 136 nt, synthetic construct
  source 1..136: mol_type = other RNA; note = pegRNA
gtgtaacctccatggctcaggttttagagctagaaatagcaagttaaaataaggctagtccgttatcaacttgaaaaagtggcaccgagtcggtgcagagtgaggattgcagaatttgttgactgagccatggagg

SEQ ID NO: 4992 - RNA, 136 nt, synthetic construct
  source 1..136: mol_type = other RNA; note = pegRNA
gtgtaacctccatggctcaggttttagagctagaaatagcaagttaaaataaggctagtccgttatcaacttgaaaaagtggcaccgagtcggtgcagagtgaggattgcagaatttgtttactgagccatggagg

SEQ ID NO: 4993 - RNA, 136 nt, synthetic construct
  source 1..136: mol_type = other RNA; note = pegRNA
gtgtaacctccatggctcaggttttagagctagaaatagcaagttaaaataaggctagtccgttatcaacttgaaaaagtggcaccgagtcggtgcaggattgcagaatttgttaactgagccatggaggtttttt

SEQ ID NO: 4994 - RNA, 136 nt, synthetic construct
  source 1..136: mol_type = other RNA; note = pegRNA
gtgtaacctccatggctcaggttttagagctagaaatagcaagttaaaataaggctagtccgttatcaacttgaaaaagtggcaccgagtcggtgcaggattgcagaatttgttgactgagccatggaggtttttt

SEQ ID NO: 4995 - RNA, 136 nt, synthetic construct
  source 1..136: mol_type = other RNA; note = pegRNA
gtgtaacctccatggctcaggttttagagctagaaatagcaagttaaaataaggctagtccgttatcaacttgaaaaagtggcaccgagtcggtgcaggattgcagaatttgtttactgagccatggaggtttttt

SEQ ID NO: 4996 - RNA, 136 nt, synthetic construct
  source 1..136: mol_type = other RNA; note = pegRNA
gtgtaacctccatggctcaggttttagagctagaaatagcaagttaaaataaggctagtccgttatcaacttgaaaaagtggcaccgagtcggtgcagtgaggattgcagaatttgttaactgagccatggaggtt

SEQ ID NO: 4997 - RNA, 136 nt, synthetic construct
  source 1..136: mol_type = other RNA; note = pegRNA
gtgtaacctccatggctcaggttttagagctagaaatagcaagttaaaataaggctagtccgttatcaacttgaaaaagtggcaccgagtcggtgcagtgaggattgcagaatttgttaactgagccatggatttt

SEQ ID NO: 4998 - RNA, 136 nt, synthetic construct
  source 1..136: mol_type = other RNA; note = pegRNA
gtgtaacctccatggctcaggttttagagctagaaatagcaagttaaaataaggctagtccgttatcaacttgaaaaagtggcaccgagtcggtgcagtgaggattgcagaatttgttgactgagccatggaggtt

SEQ ID NO: 4999 - RNA, 136 nt, synthetic construct
  source 1..136: mol_type = other RNA; note = pegRNA
gtgtaacctccatggctcaggttttagagctagaaatagcaagttaaaataaggctagtccgttatcaacttgaaaaagtggcaccgagtcggtgcagtgaggattgcagaatttgttgactgagccatggatttt

SEQ ID NO: 5000 - RNA, 136 nt, synthetic construct
  source 1..136: mol_type = other RNA; note = pegRNA
gtgtaacctccatggctcaggttttagagctagaaatagcaagttaaaataaggctagtccgttatcaacttgaaaaagtggcaccgagtcggtgcagtgaggattgcagaatttgtttactgagccatggaggtt

SEQ ID NO: 5001 - RNA, 136 nt, synthetic construct
  source 1..136: mol_type = other RNA; note = pegRNA
gtgtaacctccatggctcaggttttagagctagaaatagcaagttaaaataaggctagtccgttatcaacttgaaaaagtggcaccgagtcggtgcagtgaggattgcagaatttgtttactgagccatggatttt

SEQ ID NO: 5002 - RNA, 136 nt, synthetic construct
  source 1..136: mol_type = other RNA; note = pegRNA
gtgtaacctccatggctcaggttttagagctagaaatagcaagttaaaataaggctagtccgttatcaacttgaaaaagtggcaccgagtcggtgcattgcagaatttgttaactgagccatggaggttacatttt

SEQ ID NO: 5003 - RNA, 136 nt, synthetic construct
  source 1..136: mol_type = other RNA; note = pegRNA
gtgtaacctccatggctcaggttttagagctagaaatagcaagttaaaataaggctagtccgttatcaacttgaaaaagtggcaccgagtcggtgcattgcagaatttgttgactgagccatggaggttacatttt

SEQ ID NO: 5004 - RNA, 136 nt, synthetic construct
  source 1..136: mol_type = other RNA; note = pegRNA
gtgtaacctccatggctcaggttttagagctagaaatagcaagttaaaataaggctagtccgttatcaacttgaaaaagtggcaccgagtcggtgcattgcagaatttgtttactgagccatggaggttacatttt

SEQ ID NO: 5005 - RNA, 136 nt, synthetic construct
  source 1..136: mol_type = other RNA; note = pegRNA
gtgtaacctccatggctcaggttttagagctagaaatagcaagttaaaataaggctagtccgttatcaacttgaaaaagtggcaccgagtcggtgccagagtgaggattgcagaatttgttaactgagccatggag

SEQ ID NO: 5006 - RNA, 136 nt, synthetic construct
  source 1..136: mol_type = other RNA; note = pegRNA
gtgtaacctccatggctcaggttttagagctagaaatagcaagttaaaataaggctagtccgttatcaacttgaaaaagtggcaccgagtcggtgccagagtgaggattgcagaatttgttgactgagccatggag

SEQ ID NO: 5007 - RNA, 136 nt, synthetic construct
  source 1..136: mol_type = other RNA; note = pegRNA
gtgtaacctccatggctcaggttttagagctagaaatagcaagttaaaataaggctagtccgttatcaacttgaaaaagtggcaccgagtcggtgccagagtgaggattgcagaatttgtttactgagccatggag

SEQ ID NO: 5008 - RNA, 136 nt, synthetic construct
  source 1..136: mol_type = other RNA; note = pegRNA
gtgtaacctccatggctcaggttttagagctagaaatagcaagttaaaataaggctagtccgttatcaacttgaaaaagtggcaccgagtcggtgcccagagtgaggattgcagaatttgttaactgagccatgga

SEQ ID NO: 5009 - RNA, 136 nt, synthetic construct
  source 1..136: mol_type = other RNA; note = pegRNA
gtgtaacctccatggctcaggttttagagctagaaatagcaagttaaaataaggctagtccgttatcaacttgaaaaagtggcaccgagtcggtgcccagagtgaggattgcagaatttgttgactgagccatgga

SEQ ID NO: 5010 - RNA, 136 nt, synthetic construct
  source 1..136: mol_type = other RNA; note = pegRNA
gtgtaacctccatggctcaggttttagagctagaaatagcaagttaaaataaggctagtccgttatcaacttgaaaaagtggcaccgagtcggtgcccagagtgaggattgcagaatttgtttactgagccatgga

SEQ ID NO: 5011 - RNA, 136 nt, synthetic construct
  source 1..136: mol_type = other RNA; note = pegRNA
gtgtaacctccatggctcaggttttagagctagaaatagcaagttaaaataaggctagtccgttatcaacttgaaaaagtggcaccgagtcggtgccccagagtgaggattgcagaatttgttaactgagccatgg

SEQ ID NO: 5012 - RNA, 136 nt, synthetic construct
  source 1..136: mol_type = other RNA; note = pegRNA
gtgtaacctccatggctcaggttttagagctagaaatagcaagttaaaataaggctagtccgttatcaacttgaaaaagtggcaccgagtcggtgccccagagtgaggattgcagaatttgttgactgagccatgg

SEQ ID NO: 5013 - RNA, 136 nt, synthetic construct
  source 1..136: mol_type = other RNA; note = pegRNA
gtgtaacctccatggctcaggttttagagctagaaatagcaagttaaaataaggctagtccgttatcaacttgaaaaagtggcaccgagtcggtgccccagagtgaggattgcagaatttgtttactgagccatgg

SEQ ID NO: 5014 - RNA, 136 nt, synthetic construct
  source 1..136: mol_type = other RNA; note = pegRNA
gtgtaacctccatggctcaggttttagagctagaaatagcaagttaaaataaggctagtccgttatcaacttgaaaaagtggcaccgagtcggtgcgaggattgcagaatttgttaactgagccatggaggttaca

SEQ ID NO: 5015 - RNA, 136 nt, synthetic construct
  source 1..136: mol_type = other RNA; note = pegRNA
gtgtaacctccatggctcaggttttagagctagaaatagcaagttaaaataaggctagtccgttatcaacttgaaaaagtggcaccgagtcggtgcgaggattgcagaatttgttaactgagccatggaggttttt

SEQ ID NO: 5016 - RNA, 136 nt, synthetic construct
  source 1..136: mol_type = other RNA; note = pegRNA
gtgtaacctccatggctcaggttttagagctagaaatagcaagttaaaataaggctagtccgttatcaacttgaaaaagtggcaccgagtcggtgcgaggattgcagaatttgttcactgagccatggaggttttt

SEQ ID NO: 5017 - RNA, 136 nt, synthetic construct
  source 1..136: mol_type = other RNA; note = pegRNA
gtgtaacctccatggctcaggttttagagctagaaatagcaagttaaaataaggctagtccgttatcaacttgaaaaagtggcaccgagtcggtgcgaggattgcagaatttgttgactgagccatggaggttaca

SEQ ID NO: 5018 - RNA, 136 nt, synthetic construct
  source 1..136: mol_type = other RNA; note = pegRNA
gtgtaacctccatggctcaggttttagagctagaaatagcaagttaaaataaggctagtccgttatcaacttgaaaaagtggcaccgagtcggtgcgaggattgcagaatttgttgactgagccatggaggttttt

SEQ ID NO: 5019 - RNA, 136 nt, synthetic construct
  source 1..136: mol_type = other RNA; note = pegRNA
gtgtaacctccatggctcaggttttagagctagaaatagcaagttaaaataaggctagtccgttatcaacttgaaaaagtggcaccgagtcggtgcgaggattgcagaatttgtttactgagccatggaggttaca

SEQ ID NO: 5020 - RNA, 136 nt, synthetic construct
  source 1..136: mol_type = other RNA; note = pegRNA
gtgtaacctccatggctcaggttttagagctagaaatagcaagttaaaataaggctagtccgttatcaacttgaaaaagtggcaccgagtcggtgcgaggattgcagaatttgtttactgagccatggaggttttt

SEQ ID NO: 5021 - RNA, 136 nt, synthetic construct
  source 1..136: mol_type = other RNA; note = pegRNA
gtgtaacctccatggctcaggttttagagctagaaatagcaagttaaaataaggctagtccgttatcaacttgaaaaagtggcaccgagtcggtgcgagtgaggattgcagaatttgttaactgagccatggaggt

SEQ ID NO: 5022 - RNA, 136 nt, synthetic construct
  source 1..136: mol_type = other RNA; note = pegRNA
gtgtaacctccatggctcaggttttagagctagaaatagcaagttaaaataaggctagtccgttatcaacttgaaaaagtggcaccgagtcggtgcgagtgaggattgcagaatttgttaactgagccatggtttt

SEQ ID NO: 5023 - RNA, 136 nt, synthetic construct
  source 1..136: mol_type = other RNA; note = pegRNA
gtgtaacctccatggctcaggttttagagctagaaatagcaagttaaaataaggctagtccgttatcaacttgaaaaagtggcaccgagtcggtgcgagtgaggattgcagaatttgttgactgagccatggaggt

SEQ ID NO: 5024 - RNA, 136 nt, synthetic construct
  source 1..136: mol_type = other RNA; note = pegRNA
gtgtaacctccatggctcaggttttagagctagaaatagcaagttaaaataaggctagtccgttatcaacttgaaaaagtggcaccgagtcggtgcgagtgaggattgcagaatttgttgactgagccatggtttt

SEQ ID NO: 5025 - RNA, 136 nt, synthetic construct
  source 1..136: mol_type = other RNA; note = pegRNA
gtgtaacctccatggctcaggttttagagctagaaatagcaagttaaaataaggctagtccgttatcaacttgaaaaagtggcaccgagtcggtgcgagtgaggattgcagaatttgtttactgagccatggaggt

SEQ ID NO: 5026 - RNA, 136 nt, synthetic construct
  source 1..136: mol_type = other RNA; note = pegRNA
gtgtaacctccatggctcaggttttagagctagaaatagcaagttaaaataaggctagtccgttatcaacttgaaaaagtggcaccgagtcggtgcgagtgaggattgcagaatttgtttactgagccatggtttt

SEQ ID NO: 5027 - RNA, 136 nt, synthetic construct
  source 1..136: mol_type = other RNA; note = pegRNA
gtgtaacctccatggctcaggttttagagctagaaatagcaagttaaaataaggctagtccgttatcaacttgaaaaagtggcaccgagtcggtgcgattgcagaatttgttaactgagccatggaggttactttt

SEQ ID NO: 5028 - RNA, 136 nt, synthetic construct
  source 1..136: mol_type = other RNA; note = pegRNA
gtgtaacctccatggctcaggttttagagctagaaatagcaagttaaaataaggctagtccgttatcaacttgaaaaagtggcaccgagtcggtgcgattgcagaatttgttgactgagccatggaggttactttt

SEQ ID NO: 5029 - RNA, 136 nt, synthetic construct
  source 1..136: mol_type = other RNA; note = pegRNA
gtgtaacctccatggctcaggttttagagctagaaatagcaagttaaaataaggctagtccgttatcaacttgaaaaagtggcaccgagtcggtgcgattgcagaatttgtttactgagccatggaggttactttt

SEQ ID NO: 5030 - RNA, 136 nt, synthetic construct
  source 1..136: mol_type = other RNA; note = pegRNA
gtgtaacctccatggctcaggttttagagctagaaatagcaagttaaaataaggctagtccgttatcaacttgaaaaagtggcaccgagtcggtgcggattgcagaatttgttaactgagccatggaggttatttt

SEQ ID NO: 5031 - RNA, 136 nt, synthetic construct
  source 1..136: mol_type = other RNA; note = pegRNA
gtgtaacctccatggctcaggttttagagctagaaatagcaagttaaaataaggctagtccgttatcaacttgaaaaagtggcaccgagtcggtgcggattgcagaatttgttcactgagccatggaggttatttt

SEQ ID NO: 5032 - RNA, 136 nt, synthetic construct
  source 1..136: mol_type = other RNA; note = pegRNA
gtgtaacctccatggctcaggttttagagctagaaatagcaagttaaaataaggctagtccgttatcaacttgaaaaagtggcaccgagtcggtgcggattgcagaatttgttgactgagccatggaggttatttt

SEQ ID NO: 5033 - RNA, 136 nt, synthetic construct
  source 1..136: mol_type = other RNA; note = pegRNA
gtgtaacctccatggctcaggttttagagctagaaatagcaagttaaaataaggctagtccgttatcaacttgaaaaagtggcaccgagtcggtgcggattgcagaatttgtttactgagccatggaggttatttt

SEQ ID NO: 5034 - RNA, 136 nt, synthetic construct
  source 1..136: mol_type = other RNA; note = pegRNA
gtgtaacctccatggctcaggttttagagctagaaatagcaagttaaaataaggctagtccgttatcaacttgaaaaagtggcaccgagtcggtgcgtgaggattgcagaatttgttaactgagccatggaggtta

SEQ ID NO: 5035 - RNA, 136 nt, synthetic construct
  source 1..136: mol_type = other RNA; note = pegRNA
gtgtaacctccatggctcaggttttagagctagaaatagcaagttaaaataaggctagtccgttatcaacttgaaaaagtggcaccgagtcggtgcgtgaggattgcagaatttgttaactgagccatggagtttt

SEQ ID NO: 5036 - RNA, 136 nt, synthetic construct
  source 1..136: mol_type = other RNA; note = pegRNA
gtgtaacctccatggctcaggttttagagctagaaatagcaagttaaaataaggctagtccgttatcaacttgaaaaagtggcaccgagtcggtgcgtgaggattgcagaatttgttcactgagccatggaggtta

SEQ ID NO: 5037 - RNA, 136 nt, synthetic construct
  source 1..136: mol_type = other RNA; note = pegRNA
gtgtaacctccatggctcaggttttagagctagaaatagcaagttaaaataaggctagtccgttatcaacttgaaaaagtggcaccgagtcggtgcgtgaggattgcagaatttgttcactgagccatggagtttt

SEQ ID NO: 5038 - RNA, 136 nt, synthetic construct
  source 1..136: mol_type = other RNA; note = pegRNA
gtgtaacctccatggctcaggttttagagctagaaatagcaagttaaaataaggctagtccgttatcaacttgaaaaagtggcaccgagtcggtgcgtgaggattgcagaatttgttgactgagccatggaggtta

SEQ ID NO: 5039 - RNA, 136 nt, synthetic construct
  source 1..136: mol_type = other RNA; note = pegRNA
gtgtaacctccatggctcaggttttagagctagaaatagcaagttaaaataaggctagtccgttatcaacttgaaaaagtggcaccgagtcggtgcgtgaggattgcagaatttgttgactgagccatggagtttt

SEQ ID NO: 5040 - RNA, 136 nt, synthetic construct
  source 1..136: mol_type = other RNA; note = pegRNA
gtgtaacctccatggctcaggttttagagctagaaatagcaagttaaaataaggctagtccgttatcaacttgaaaaagtggcaccgagtcggtgcgtgaggattgcagaatttgtttactgagccatggaggtta

SEQ ID NO: 5041 - RNA, 136 nt, synthetic construct
  source 1..136: mol_type = other RNA; note = pegRNA
gtgtaacctccatggctcaggttttagagctagaaatagcaagttaaaataaggctagtccgttatcaacttgaaaaagtggcaccgagtcggtgcgtgaggattgcagaatttgtttactgagccatggagtttt

SEQ ID NO: 5042 - RNA, 136 nt, synthetic construct
  source 1..136: mol_type = other RNA; note = pegRNA
gtgtaacctccatggctcaggttttagagctagaaatagcaagttaaaataaggctagtccgttatcaacttgaaaaagtggcaccgagtcggtgctgaggattgcagaatttgttaactgagccatggaggttac

SEQ ID NO: 5043 - RNA, 136 nt, synthetic construct
  source 1..136: mol_type = other RNA; note = pegRNA
gtgtaacctccatggctcaggttttagagctagaaatagcaagttaaaataaggctagtccgttatcaacttgaaaaagtggcaccgagtcggtgctgaggattgcagaatttgttaactgagccatggaggtttt

SEQ ID NO: 5044 - RNA, 136 nt, synthetic construct
  source 1..136: mol_type = other RNA; note = pegRNA
gtgtaacctccatggctcaggttttagagctagaaatagcaagttaaaataaggctagtccgttatcaacttgaaaaagtggcaccgagtcggtgctgaggattgcagaatttgttgactgagccatggaggttac

SEQ ID NO: 5045 - RNA, 136 nt, synthetic construct
  source 1..136: mol_type = other RNA; note = pegRNA
gtgtaacctccatggctcaggttttagagctagaaatagcaagttaaaataaggctagtccgttatcaacttgaaaaagtggcaccgagtcggtgctgaggattgcagaatttgttgactgagccatggaggtttt

SEQ ID NO: 5046 - RNA, 136 nt, synthetic construct
  source 1..136: mol_type = other RNA; note = pegRNA
gtgtaacctccatggctcaggttttagagctagaaatagcaagttaaaataaggctagtccgttatcaacttgaaaaagtggcaccgagtcggtgctgaggattgcagaatttgtttactgagccatggaggttac

SEQ ID NO: 5047 - RNA, 136 nt, synthetic construct
  source 1..136: mol_type = other RNA; note = pegRNA
gtgtaacctccatggctcaggttttagagctagaaatagcaagttaaaataaggctagtccgttatcaacttgaaaaagtggcaccgagtcggtgctgaggattgcagaatttgtttactgagccatggaggtttt

SEQ ID NO: 5048 - RNA, 137 nt, synthetic construct
  source 1..137: mol_type = other RNA; note = pegRNA
gtgtaacctccatggctcaggttttagagctagaaatagcaagttaaaataaggctagtccgttatcaacttgaaaaagtggcaccgagtcggtgcagagtgaggattgcagaatttgttaactgagccatggaggt

SEQ ID NO: 5049 - RNA, 137 nt, synthetic construct
  source 1..137: mol_type = other RNA; note = pegRNA
gtgtaacctccatggctcaggttttagagctagaaatagcaagttaaaataaggctagtccgttatcaacttgaaaaagtggcaccgagtcggtgcagagtgaggattgcagaatttgttaactgagccatggtttt

SEQ ID NO: 5050 - RNA, 137 nt, synthetic construct
  source 1..137: mol_type = other RNA; note = pegRNA
gtgtaacctccatggctcaggttttagagctagaaatagcaagttaaaataaggctagtccgttatcaacttgaaaaagtggcaccgagtcggtgcagagtgaggattgcagaatttgttgactgagccatggaggt

SEQ ID NO: 5051 - RNA, 137 nt, synthetic construct
  source 1..137: mol_type = other RNA; note = pegRNA
gtgtaacctccatggctcaggttttagagctagaaatagcaagttaaaataaggctagtccgttatcaacttgaaaaagtggcaccgagtcggtgcagagtgaggattgcagaatttgttgactgagccatggtttt

SEQ ID NO: 5052 - RNA, 137 nt, synthetic construct
  source 1..137: mol_type = other RNA; note = pegRNA
gtgtaacctccatggctcaggttttagagctagaaatagcaagttaaaataaggctagtccgttatcaacttgaaaaagtggcaccgagtcggtgcagagtgaggattgcagaatttgtttactgagccatggaggt

SEQ ID NO: 5053 - RNA, 137 nt, synthetic construct
  source 1..137: mol_type = other RNA; note = pegRNA
gtgtaacctccatggctcaggttttagagctagaaatagcaagttaaaataaggctagtccgttatcaacttgaaaaagtggcaccgagtcggtgcagagtgaggattgcagaatttgtttactgagccatggtttt

SEQ ID NO: 5054 - RNA, 137 nt, synthetic construct
  source 1..137: mol_type = other RNA; note = pegRNA
gtgtaacctccatggctcaggttttagagctagaaatagcaagttaaaataaggctagtccgttatcaacttgaaaaagtggcaccgagtcggtgcaggattgcagaatttgttaactgagccatggaggttatttt

SEQ ID NO: 5055 - RNA, 137 nt, synthetic construct
  source 1..137: mol_type = other RNA; note = pegRNA
gtgtaacctccatggctcaggttttagagctagaaatagcaagttaaaataaggctagtccgttatcaacttgaaaaagtggcaccgagtcggtgcaggattgcagaatttgttgactgagccatggaggttatttt

SEQ ID NO: 5056 - RNA, 137 nt, synthetic construct
  source 1..137: mol_type = other RNA; note = pegRNA
gtgtaacctccatggctcaggttttagagctagaaatagcaagttaaaataaggctagtccgttatcaacttgaaaaagtggcaccgagtcggtgcaggattgcagaatttgtttactgagccatggaggttatttt

SEQ ID NO: 5057 - RNA, 137 nt, synthetic construct
  source 1..137: mol_type = other RNA; note = pegRNA
gtgtaacctccatggctcaggttttagagctagaaatagcaagttaaaataaggctagtccgttatcaacttgaaaaagtggcaccgagtcggtgcagtgaggattgcagaatttgttaactgagccatggaggtta

SEQ ID NO: 5058 - RNA, 137 nt, synthetic construct
  source 1..137: mol_type = other RNA; note = pegRNA
gtgtaacctccatggctcaggttttagagctagaaatagcaagttaaaataaggctagtccgttatcaacttgaaaaagtggcaccgagtcggtgcagtgaggattgcagaatttgttaactgagccatggagtttt

SEQ ID NO: 5059 - RNA, 137 nt, synthetic construct
  source 1..137: mol_type = other RNA; note = pegRNA
gtgtaacctccatggctcaggttttagagctagaaatagcaagttaaaataaggctagtccgttatcaacttgaaaaagtggcaccgagtcggtgcagtgaggattgcagaatttgttgactgagccatggaggtta

SEQ ID NO: 5060 - RNA, 137 nt, synthetic construct
  source 1..137: mol_type = other RNA; note = pegRNA
gtgtaacctccatggctcaggttttagagctagaaatagcaagttaaaataaggctagtccgttatcaacttgaaaaagtggcaccgagtcggtgcagtgaggattgcagaatttgttgactgagccatggagtttt

SEQ ID NO: 5061 - RNA, 137 nt, synthetic construct
  source 1..137: mol_type = other RNA; note = pegRNA
gtgtaacctccatggctcaggttttagagctagaaatagcaagttaaaataaggctagtccgttatcaacttgaaaaagtggcaccgagtcggtgcagtgaggattgcagaatttgtttactgagccatggaggtta

SEQ ID NO: 5062 - RNA, 137 nt, synthetic construct
  source 1..137: mol_type = other RNA; note = pegRNA
gtgtaacctccatggctcaggttttagagctagaaatagcaagttaaaataaggctagtccgttatcaacttgaaaaagtggcaccgagtcggtgcagtgaggattgcagaatttgtttactgagccatggagtttt

SEQ ID NO: 5063 - RNA, 137 nt, synthetic construct
  source 1..137: mol_type = other RNA; note = pegRNA
gtgtaacctccatggctcaggttttagagctagaaatagcaagttaaaataaggctagtccgttatcaacttgaaaaagtggcaccgagtcggtgccagagtgaggattgcagaatttgttaactgagccatggagg

SEQ ID NO: 5064 - RNA, 137 nt, synthetic construct
  source 1..137: mol_type = other RNA; note = pegRNA
gtgtaacctccatggctcaggttttagagctagaaatagcaagttaaaataaggctagtccgttatcaacttgaaaaagtggcaccgagtcggtgccagagtgaggattgcagaatttgttgactgagccatggagg

SEQ ID NO: 5065 - RNA, 137 nt, synthetic construct
  source 1..137: mol_type = other RNA; note = pegRNA
gtgtaacctccatggctcaggttttagagctagaaatagcaagttaaaataaggctagtccgttatcaacttgaaaaagtggcaccgagtcggtgccagagtgaggattgcagaatttgtttactgagccatggagg

SEQ ID NO: 5066 - RNA, 137 nt, synthetic construct
  source 1..137: mol_type = other RNA; note = pegRNA
gtgtaacctccatggctcaggttttagagctagaaatagcaagttaaaataaggctagtccgttatcaacttgaaaaagtggcaccgagtcggtgcccagagtgaggattgcagaatttgttaactgagccatggag

SEQ ID NO: 5067 - RNA, 137 nt, synthetic construct
  source 1..137: mol_type = other RNA; note = pegRNA
gtgtaacctccatggctcaggttttagagctagaaatagcaagttaaaataaggctagtccgttatcaacttgaaaaagtggcaccgagtcggtgcccagagtgaggattgcagaatttgttgactgagccatggag

SEQ ID NO: 5068 - RNA, 137 nt, synthetic construct
  source 1..137: mol_type = other RNA; note = pegRNA
gtgtaacctccatggctcaggttttagagctagaaatagcaagttaaaataaggctagtccgttatcaacttgaaaaagtggcaccgagtcggtgcccagagtgaggattgcagaatttgtttactgagccatggag

SEQ ID NO: 5069 - RNA, 137 nt, synthetic construct
  source 1..137: mol_type = other RNA; note = pegRNA
gtgtaacctccatggctcaggttttagagctagaaatagcaagttaaaataaggctagtccgttatcaacttgaaaaagtggcaccgagtcggtgccccagagtgaggattgcagaatttgttaactgagccatgga

SEQ ID NO: 5070 - RNA, 137 nt, synthetic construct
  source 1..137: mol_type = other RNA; note = pegRNA
gtgtaacctccatggctcaggttttagagctagaaatagcaagttaaaataaggctagtccgttatcaacttgaaaaagtggcaccgagtcggtgccccagagtgaggattgcagaatttgttgactgagccatgga

SEQ ID NO: 5071 - RNA, 137 nt, synthetic construct
  source 1..137: mol_type = other RNA; note = pegRNA
gtgtaacctccatggctcaggttttagagctagaaatagcaagttaaaataaggctagtccgttatcaacttgaaaaagtggcaccgagtcggtgccccagagtgaggattgcagaatttgtttactgagccatgga

SEQ ID NO: 5072 - RNA, 137 nt, synthetic construct
  source 1..137: mol_type = other RNA; note = pegRNA
gtgtaacctccatggctcaggttttagagctagaaatagcaagttaaaataaggctagtccgttatcaacttgaaaaagtggcaccgagtcggtgcgaggattgcagaatttgttaactgagccatggaggtttttt

SEQ ID NO: 5073 - RNA, 137 nt, synthetic construct
  source 1..137: mol_type = other RNA; note = pegRNA
gtgtaacctccatggctcaggttttagagctagaaatagcaagttaaaataaggctagtccgttatcaacttgaaaaagtggcaccgagtcggtgcgaggattgcagaatttgttgactgagccatggaggtttttt

SEQ ID NO: 5074 - RNA, 137 nt, synthetic construct
  source 1..137: mol_type = other RNA; note = pegRNA
gtgtaacctccatggctcaggttttagagctagaaatagcaagttaaaataaggctagtccgttatcaacttgaaaaagtggcaccgagtcggtgcgaggattgcagaatttgtttactgagccatggaggtttttt

SEQ ID NO: 5075 - RNA, 137 nt, synthetic construct
  source 1..137: mol_type = other RNA; note = pegRNA
gtgtaacctccatggctcaggttttagagctagaaatagcaagttaaaataaggctagtccgttatcaacttgaaaaagtggcaccgagtcggtgcgagtgaggattgcagaatttgttaactgagccatggaggtt

SEQ ID NO: 5076 - RNA, 137 nt, synthetic construct
  source 1..137: mol_type = other RNA; note = pegRNA
gtgtaacctccatggctcaggttttagagctagaaatagcaagttaaaataaggctagtccgttatcaacttgaaaaagtggcaccgagtcggtgcgagtgaggattgcagaatttgttaactgagccatggatttt

SEQ ID NO: 5077 - RNA, 137 nt, synthetic construct
  source 1..137: mol_type = other RNA; note = pegRNA
gtgtaacctccatggctcaggttttagagctagaaatagcaagttaaaataaggctagtccgttatcaacttgaaaaagtggcaccgagtcggtgcgagtgaggattgcagaatttgttgactgagccatggaggtt

SEQ ID NO: 5078 - RNA, 137 nt, synthetic construct
  source 1..137: mol_type = other RNA; note = pegRNA
gtgtaacctccatggctcaggttttagagctagaaatagcaagttaaaataaggctagtccgttatcaacttgaaaaagtggcaccgagtcggtgcgagtgaggattgcagaatttgttgactgagccatggatttt

SEQ ID NO: 5079 - RNA, 137 nt, synthetic construct
  source 1..137: mol_type = other RNA; note = pegRNA
gtgtaacctccatggctcaggttttagagctagaaatagcaagttaaaataaggctagtccgttatcaacttgaaaaagtggcaccgagtcggtgcgagtgaggattgcagaatttgtttactgagccatggaggtt

SEQ ID NO: 5080 - RNA, 137 nt, synthetic construct
  source 1..137: mol_type = other RNA; note = pegRNA
gtgtaacctccatggctcaggttttagagctagaaatagcaagttaaaataaggctagtccgttatcaacttgaaaaagtggcaccgagtcggtgcgagtgaggattgcagaatttgtttactgagccatggatttt

SEQ ID NO: 5081 - RNA, 137 nt, synthetic construct
  source 1..137: mol_type = other RNA; note = pegRNA
gtgtaacctccatggctcaggttttagagctagaaatagcaagttaaaataaggctagtccgttatcaacttgaaaaagtggcaccgagtcggtgcgattgcagaatttgttaactgagccatggaggttacatttt

SEQ ID NO: 5082 - RNA, 137 nt, synthetic construct
  source 1..137: mol_type = other RNA; note = pegRNA
gtgtaacctccatggctcaggttttagagctagaaatagcaagttaaaataaggctagtccgttatcaacttgaaaaagtggcaccgagtcggtgcgattgcagaatttgttgactgagccatggaggttacatttt

SEQ ID NO: 5083 - RNA, 137 nt, synthetic construct
  source 1..137: mol_type = other RNA; note = pegRNA
gtgtaacctccatggctcaggttttagagctagaaatagcaagttaaaataaggctagtccgttatcaacttgaaaaagtggcaccgagtcggtgcgattgcagaatttgtttactgagccatggaggttacatttt

SEQ ID NO: 5084 - RNA, 137 nt, synthetic construct
  source 1..137: mol_type = other RNA; note = pegRNA
gtgtaacctccatggctcaggttttagagctagaaatagcaagttaaaataaggctagtccgttatcaacttgaaaaagtggcaccgagtcggtgcgcccagagtgaggattgcagaatttgttaactgagccatgg

SEQ ID NO: 5085 - RNA, 137 nt, synthetic construct
  source 1..137: mol_type = other RNA; note = pegRNA
gtgtaacctccatggctcaggttttagagctagaaatagcaagttaaaataaggctagtccgttatcaacttgaaaaagtggcaccgagtcggtgcgcccagagtgaggattgcagaatttgttgactgagccatgg

SEQ ID NO: 5086 - RNA, 137 nt, synthetic construct
  source 1..137: mol_type = other RNA; note = pegRNA
gtgtaacctccatggctcaggttttagagctagaaatagcaagttaaaataaggctagtccgttatcaacttgaaaaagtggcaccgagtcggtgcgcccagagtgaggattgcagaatttgtttactgagccatgg

SEQ ID NO: 5087 - RNA, 137 nt, synthetic construct
  source 1..137: mol_type = other RNA; note = pegRNA
gtgtaacctccatggctcaggttttagagctagaaatagcaagttaaaataaggctagtccgttatcaacttgaaaaagtggcaccgagtcggtgcggattgcagaatttgttaactgagccatggaggttactttt

SEQ ID NO: 5088 - RNA, 137 nt, synthetic construct
  source 1..137: mol_type = other RNA; note = pegRNA
gtgtaacctccatggctcaggttttagagctagaaatagcaagttaaaataaggctagtccgttatcaacttgaaaaagtggcaccgagtcggtgcggattgcagaatttgttgactgagccatggaggttactttt

SEQ ID NO: 5089 - RNA, 137 nt, synthetic construct
  source 1..137: mol_type = other RNA; note = pegRNA
gtgtaacctccatggctcaggttttagagctagaaatagcaagttaaaataaggctagtccgttatcaacttgaaaaagtggcaccgagtcggtgcggattgcagaatttgtttactgagccatggaggttactttt

SEQ ID NO: 5090 - RNA, 137 nt, synthetic construct
  source 1..137: mol_type = other RNA; note = pegRNA
gtgtaacctccatggctcaggttttagagctagaaatagcaagttaaaataaggctagtccgttatcaacttgaaaaagtggcaccgagtcggtgcgtgaggattgcagaatttgttaactgagccatggaggttac

SEQ ID NO: 5091 - RNA, 137 nt, synthetic construct
  source 1..137: mol_type = other RNA; note = pegRNA
gtgtaacctccatggctcaggttttagagctagaaatagcaagttaaaataaggctagtccgttatcaacttgaaaaagtggcaccgagtcggtgcgtgaggattgcagaatttgttaactgagccatggaggtttt

SEQ ID NO: 5092 - RNA, 137 nt, synthetic construct
  source 1..137: mol_type = other RNA; note = pegRNA
gtgtaacctccatggctcaggttttagagctagaaatagcaagttaaaataaggctagtccgttatcaacttgaaaaagtggcaccgagtcggtgcgtgaggattgcagaatttgttgactgagccatggaggttac

SEQ ID NO: 5093 - RNA, 137 nt, synthetic construct
  source 1..137: mol_type = other RNA; note = pegRNA
gtgtaacctccatggctcaggttttagagctagaaatagcaagttaaaataaggctagtccgttatcaacttgaaaaagtggcaccgagtcggtgcgtgaggattgcagaatttgttgactgagccatggaggtttt

SEQ ID NO: 5094 - RNA, 137 nt, synthetic construct
  source 1..137: mol_type = other RNA; note = pegRNA
gtgtaacctccatggctcaggttttagagctagaaatagcaagttaaaataaggctagtccgttatcaacttgaaaaagtggcaccgagtcggtgcgtgaggattgcagaatttgtttactgagccatggaggttac

SEQ ID NO: 5095 - RNA, 137 nt, synthetic construct
  source 1..137: mol_type = other RNA; note = pegRNA
gtgtaacctccatggctcaggttttagagctagaaatagcaagttaaaataaggctagtccgttatcaacttgaaaaagtggcaccgagtcggtgcgtgaggattgcagaatttgtttactgagccatggaggtttt

SEQ ID NO: 5096 - RNA, 137 nt, synthetic construct
  source 1..137: mol_type = other RNA; note = pegRNA
gtgtaacctccatggctcaggttttagagctagaaatagcaagttaaaataaggctagtccgttatcaacttgaaaaagtggcaccgagtcggtgctgaggattgcagaatttgttaactgagccatggaggttaca

SEQ ID NO: 5097 - RNA, 137 nt, synthetic construct
  source 1..137: mol_type = other RNA; note = pegRNA
gtgtaacctccatggctcaggttttagagctagaaatagcaagttaaaataaggctagtccgttatcaacttgaaaaagtggcaccgagtcggtgctgaggattgcagaatttgttaactgagccatggaggttttt

SEQ ID NO: 5098 - RNA, 137 nt, synthetic construct
  source 1..137: mol_type = other RNA; note = pegRNA
gtgtaacctccatggctcaggttttagagctagaaatagcaagttaaaataaggctagtccgttatcaacttgaaaaagtggcaccgagtcggtgctgaggattgcagaatttgttgactgagccatggaggttaca

SEQ ID NO: 5099 - RNA, 137 nt, synthetic construct
  source 1..137: mol_type = other RNA; note = pegRNA
gtgtaacctccatggctcaggttttagagctagaaatagcaagttaaaataaggctagtccgttatcaacttgaaaaagtggcaccgagtcggtgctgaggattgcagaatttgttgactgagccatggaggttttt

SEQ ID NO: 5100 - RNA, 137 nt, synthetic construct
  source 1..137: mol_type = other RNA; note = pegRNA
gtgtaacctccatggctcaggttttagagctagaaatagcaagttaaaataaggctagtccgttatcaacttgaaaaagtggcaccgagtcggtgctgaggattgcagaatttgtttactgagccatggaggttaca

SEQ ID NO: 5101 - RNA, 137 nt, synthetic construct
  source 1..137: mol_type = other RNA; note = pegRNA
gtgtaacctccatggctcaggttttagagctagaaatagcaagttaaaataaggctagtccgttatcaacttgaaaaagtggcaccgagtcggtgctgaggattgcagaatttgtttactgagccatggaggttttt

SEQ ID NO: 5102 - RNA, 138 nt, synthetic construct
  source 1..138: mol_type = other RNA; note = pegRNA
gtgtaacctccatggctcaggttttagagctagaaatagcaagttaaaataaggctagtccgttatcaacttgaaaaagtggcaccgagtcggtgcagagtgaggattgcagaatttgttaactgagccatggaggtt

SEQ ID NO: 5103 - RNA, 138 nt, synthetic construct
  source 1..138: mol_type = other RNA; note = pegRNA
gtgtaacctccatggctcaggttttagagctagaaatagcaagttaaaataaggctagtccgttatcaacttgaaaaagtggcaccgagtcggtgcagagtgaggattgcagaatttgttaactgagccatggatttt

SEQ ID NO: 5104 - RNA, 138 nt, synthetic construct
  source 1..138: mol_type = other RNA; note = pegRNA
gtgtaacctccatggctcaggttttagagctagaaatagcaagttaaaataaggctagtccgttatcaacttgaaaaagtggcaccgagtcggtgcagagtgaggattgcagaatttgttgactgagccatggaggtt

SEQ ID NO: 5105 - RNA, 138 nt, synthetic construct
  source 1..138: mol_type = other RNA; note = pegRNA
gtgtaacctccatggctcaggttttagagctagaaatagcaagttaaaataaggctagtccgttatcaacttgaaaaagtggcaccgagtcggtgcagagtgaggattgcagaatttgttgactgagccatggatttt

SEQ ID NO: 5106 - RNA, 138 nt, synthetic construct
  source 1..138: mol_type = other RNA; note = pegRNA
gtgtaacctccatggctcaggttttagagctagaaatagcaagttaaaataaggctagtccgttatcaacttgaaaaagtggcaccgagtcggtgcagagtgaggattgcagaatttgtttactgagccatggaggtt

SEQ ID NO: 5107 - RNA, 138 nt, synthetic construct
  source 1..138: mol_type = other RNA; note = pegRNA
gtgtaacctccatggctcaggttttagagctagaaatagcaagttaaaataaggctagtccgttatcaacttgaaaaagtggcaccgagtcggtgcagagtgaggattgcagaatttgtttactgagccatggatttt

SEQ ID NO: 5108 - RNA, 138 nt, synthetic construct
  source 1..138: mol_type = other RNA; note = pegRNA
gtgtaacctccatggctcaggttttagagctagaaatagcaagttaaaataaggctagtccgttatcaacttgaaaaagtggcaccgagtcggtgcaggattgcagaatttgttaactgagccatggaggttactttt

SEQ ID NO: 5109 - RNA, 138 nt, synthetic construct
  source 1..138: mol_type = other RNA; note = pegRNA
gtgtaacctccatggctcaggttttagagctagaaatagcaagttaaaataaggctagtccgttatcaacttgaaaaagtggcaccgagtcggtgcaggattgcagaatttgttgactgagccatggaggttactttt

SEQ ID NO: 5110 - RNA, 138 nt, synthetic construct
  source 1..138: mol_type = other RNA; note = pegRNA
gtgtaacctccatggctcaggttttagagctagaaatagcaagttaaaataaggctagtccgttatcaacttgaaaaagtggcaccgagtcggtgcaggattgcagaatttgtttactgagccatggaggttactttt

SEQ ID NO: 5111 - RNA, 138 nt, synthetic construct
  source 1..138: mol_type = other RNA; note = pegRNA
gtgtaacctccatggctcaggttttagagctagaaatagcaagttaaaataaggctagtccgttatcaacttgaaaaagtggcaccgagtcggtgcagtgaggattgcagaatttgttaactgagccatggaggttac

SEQ ID NO: 5112 - RNA, 138 nt, synthetic construct
  source 1..138: mol_type = other RNA; note = pegRNA
gtgtaacctccatggctcaggttttagagctagaaatagcaagttaaaataaggctagtccgttatcaacttgaaaaagtggcaccgagtcggtgcagtgaggattgcagaatttgttaactgagccatggaggtttt

SEQ ID NO: 5113 - RNA, 138 nt, synthetic construct
  source 1..138: mol_type = other RNA; note = pegRNA
gtgtaacctccatggctcaggttttagagctagaaatagcaagttaaaataaggctagtccgttatcaacttgaaaaagtggcaccgagtcggtgcagtgaggattgcagaatttgttgactgagccatggaggttac

SEQ ID NO: 5114 - RNA, 138 nt, synthetic construct
  source 1..138: mol_type = other RNA; note = pegRNA
gtgtaacctccatggctcaggttttagagctagaaatagcaagttaaaataaggctagtccgttatcaacttgaaaaagtggcaccgagtcggtgcagtgaggattgcagaatttgttgactgagccatggaggtttt

SEQ ID NO: 5115 - RNA, 138 nt, synthetic construct
  source 1..138: mol_type = other RNA; note = pegRNA
gtgtaacctccatggctcaggttttagagctagaaatagcaagttaaaataaggctagtccgttatcaacttgaaaaagtggcaccgagtcggtgcagtgaggattgcagaatttgtttactgagccatggaggttac

SEQ ID NO: 5116 - RNA, 138 nt, synthetic construct
  source 1..138: mol_type = other RNA; note = pegRNA
gtgtaacctccatggctcaggttttagagctagaaatagcaagttaaaataaggctagtccgttatcaacttgaaaaagtggcaccgagtcggtgcagtgaggattgcagaatttgtttactgagccatggaggtttt

SEQ ID NO: 5117 - RNA, 138 nt, synthetic construct
  source 1..138: mol_type = other RNA; note = pegRNA
gtgtaacctccatggctcaggttttagagctagaaatagcaagttaaaataaggctagtccgttatcaacttgaaaaagtggcaccgagtcggtgccagagtgaggattgcagaatttgttaactgagccatggaggt

SEQ ID NO: 5118 - RNA, 138 nt, synthetic construct
  source 1..138: mol_type = other RNA; note = pegRNA
gtgtaacctccatggctcaggttttagagctagaaatagcaagttaaaataaggctagtccgttatcaacttgaaaaagtggcaccgagtcggtgccagagtgaggattgcagaatttgttaactgagccatggtttt

SEQ ID NO: 5119 - RNA, 138 nt, synthetic construct
  source 1..138: mol_type = other RNA; note = pegRNA
gtgtaacctccatggctcaggttttagagctagaaatagcaagttaaaataaggctagtccgttatcaacttgaaaaagtggcaccgagtcggtgccagagtgaggattgcagaatttgttgactgagccatggaggt

SEQ ID NO: 5120 - RNA, 138 nt, synthetic construct
  source 1..138: mol_type = other RNA; note = pegRNA
gtgtaacctccatggctcaggttttagagctagaaatagcaagttaaaataaggctagtccgttatcaacttgaaaaagtggcaccgagtcggtgccagagtgaggattgcagaatttgttgactgagccatggtttt

SEQ ID NO: 5121 - RNA, 138 nt, synthetic construct
  source 1..138: mol_type = other RNA; note = pegRNA
gtgtaacctccatggctcaggttttagagctagaaatagcaagttaaaataaggctagtccgttatcaacttgaaaaagtggcaccgagtcggtgccagagtgaggattgcagaatttgtttactgagccatggaggt

SEQ ID NO: 5122 - RNA, 138 nt, synthetic construct
  source 1..138: mol_type = other RNA; note = pegRNA
gtgtaacctccatggctcaggttttagagctagaaatagcaagttaaaataaggctagtccgttatcaacttgaaaaagtggcaccgagtcggtgccagagtgaggattgcagaatttgtttactgagccatggtttt

SEQ ID NO: 5123 - RNA, 138 nt, synthetic construct
  source 1..138: mol_type = other RNA; note = pegRNA
gtgtaacctccatggctcaggttttagagctagaaatagcaagttaaaataaggctagtccgttatcaacttgaaaaagtggcaccgagtcggtgcccagagtgaggattgcagaatttgttaactgagccatggagg

SEQ ID NO: 5124 - RNA, 138 nt, synthetic construct
  source 1..138: mol_type = other RNA; note = pegRNA
gtgtaacctccatggctcaggttttagagctagaaatagcaagttaaaataaggctagtccgttatcaacttgaaaaagtggcaccgagtcggtgcccagagtgaggattgcagaatttgttgactgagccatggagg

SEQ ID NO: 5125 - RNA, 138 nt, synthetic construct
  source 1..138: mol_type = other RNA; note = pegRNA
gtgtaacctccatggctcaggttttagagctagaaatagcaagttaaaataaggctagtccgttatcaacttgaaaaagtggcaccgagtcggtgcccagagtgaggattgcagaatttgtttactgagccatggagg

SEQ ID NO: 5126 - RNA, 138 nt, synthetic construct
  source 1..138: mol_type = other RNA; note = pegRNA
gtgtaacctccatggctcaggttttagagctagaaatagcaagttaaaataaggctagtccgttatcaacttgaaaaagtggcaccgagtcggtgccccagagtgaggattgcagaatttgttaactgagccatggag

SEQ ID NO: 5127 - RNA, 138 nt, synthetic construct
  source 1..138: mol_type = other RNA; note = pegRNA
gtgtaacctccatggctcaggttttagagctagaaatagcaagttaaaataaggctagtccgttatcaacttgaaaaagtggcaccgagtcggtgccccagagtgaggattgcagaatttgttgactgagccatggag

SEQ ID NO: 5128 - RNA, 138 nt, synthetic construct
  source 1..138: mol_type = other RNA; note = pegRNA
gtgtaacctccatggctcaggttttagagctagaaatagcaagttaaaataaggctagtccgttatcaacttgaaaaagtggcaccgagtcggtgccccagagtgaggattgcagaatttgtttactgagccatggag

SEQ ID NO: 5129 - RNA, 138 nt, synthetic construct
  source 1..138: mol_type = other RNA; note = pegRNA
gtgtaacctccatggctcaggttttagagctagaaatagcaagttaaaataaggctagtccgttatcaacttgaaaaagtggcaccgagtcggtgcgaggattgcagaatttgttaactgagccatggaggttatttt

SEQ ID NO: 5130 - RNA, 138 nt, synthetic construct
  source 1..138: mol_type = other RNA; note = pegRNA
gtgtaacctccatggctcaggttttagagctagaaatagcaagttaaaataaggctagtccgttatcaacttgaaaaagtggcaccgagtcggtgcgaggattgcagaatttgttcactgagccatggaggttatttt

SEQ ID NO: 5131 - RNA, 138 nt, synthetic construct
  source 1..138: mol_type = other RNA; note = pegRNA
gtgtaacctccatggctcaggttttagagctagaaatagcaagttaaaataaggctagtccgttatcaacttgaaaaagtggcaccgagtcggtgcgaggattgcagaatttgttgactgagccatggaggttatttt

SEQ ID NO: 5132 - RNA, 138 nt, synthetic construct
  source 1..138: mol_type = other RNA; note = pegRNA
gtgtaacctccatggctcaggttttagagctagaaatagcaagttaaaataaggctagtccgttatcaacttgaaaaagtggcaccgagtcggtgcgaggattgcagaatttgtttactgagccatggaggttatttt

SEQ ID NO: 5133 - RNA, 138 nt, synthetic construct
  source 1..138: mol_type = other RNA; note = pegRNA
gtgtaacctccatggctcaggttttagagctagaaatagcaagttaaaataaggctagtccgttatcaacttgaaaaagtggcaccgagtcggtgcgagtgaggattgcagaatttgttaactgagccatggaggtta

SEQ ID NO: 5134 - RNA, 138 nt, synthetic construct
  source 1..138: mol_type = other RNA; note = pegRNA
gtgtaacctccatggctcaggttttagagctagaaatagcaagttaaaataaggctagtccgttatcaacttgaaaaagtggcaccgagtcggtgcgagtgaggattgcagaatttgttaactgagccatggagtttt

SEQ ID NO: 5135 - RNA, 138 nt, synthetic construct
  source 1..138: mol_type = other RNA; note = pegRNA
gtgtaacctccatggctcaggttttagagctagaaatagcaagttaaaataaggctagtccgttatcaacttgaaaaagtggcaccgagtcggtgcgagtgaggattgcagaatttgttgactgagccatggaggtta

SEQ ID NO: 5136 - RNA, 138 nt, synthetic construct
  source 1..138: mol_type = other RNA; note = pegRNA
gtgtaacctccatggctcaggttttagagctagaaatagcaagttaaaataaggctagtccgttatcaacttgaaaaagtggcaccgagtcggtgcgagtgaggattgcagaatttgttgactgagccatggagtttt

SEQ ID NO: 5137 - RNA, 138 nt, synthetic construct
  source 1..138: mol_type = other RNA; note = pegRNA
gtgtaacctccatggctcaggttttagagctagaaatagcaagttaaaataaggctagtccgttatcaacttgaaaaagtggcaccgagtcggtgcgagtgaggattgcagaatttgtttactgagccatggaggtta

SEQ ID NO: 5138 - RNA, 138 nt, synthetic construct
  source 1..138: mol_type = other RNA; note = pegRNA
gtgtaacctccatggctcaggttttagagctagaaatagcaagttaaaataaggctagtccgttatcaacttgaaaaagtggcaccgagtcggtgcgagtgaggattgcagaatttgtttactgagccatggagtttt

SEQ ID NO: 5139 - RNA, 138 nt, synthetic construct
  source 1..138: mol_type = other RNA; note = pegRNA
gtgtaacctccatggctcaggttttagagctagaaatagcaagttaaaataaggctagtccgttatcaacttgaaaaagtggcaccgagtcggtgcgcccagagtgaggattgcagaatttgttaactgagccatgga

SEQ ID NO: 5140 - RNA, 138 nt, synthetic construct
  source 1..138: mol_type = other RNA; note = pegRNA
gtgtaacctccatggctcaggttttagagctagaaatagcaagttaaaataaggctagtccgttatcaacttgaaaaagtggcaccgagtcggtgcgcccagagtgaggattgcagaatttgttgactgagccatgga

SEQ ID NO: 5141 - RNA, 138 nt, synthetic construct
  source 1..138: mol_type = other RNA; note = pegRNA
gtgtaacctccatggctcaggttttagagctagaaatagcaagttaaaataaggctagtccgttatcaacttgaaaaagtggcaccgagtcggtgcgcccagagtgaggattgcagaatttgtttactgagccatgga

SEQ ID NO: 5142 - RNA, 138 nt, synthetic construct
  source 1..138: mol_type = other RNA; note = pegRNA
gtgtaacctccatggctcaggttttagagctagaaatagcaagttaaaataaggctagtccgttatcaacttgaaaaagtggcaccgagtcggtgcggattgcagaatttgttaactgagccatggaggttacatttt

SEQ ID NO: 5143 - RNA, 138 nt, synthetic construct
  source 1..138: mol_type = other RNA; note = pegRNA
gtgtaacctccatggctcaggttttagagctagaaatagcaagttaaaataaggctagtccgttatcaacttgaaaaagtggcaccgagtcggtgcggattgcagaatttgttgactgagccatggaggttacatttt

SEQ ID NO: 5144 - RNA, 138 nt, synthetic construct
  source 1..138: mol_type = other RNA; note = pegRNA
gtgtaacctccatggctcaggttttagagctagaaatagcaagttaaaataaggctagtccgttatcaacttgaaaaagtggcaccgagtcggtgcggattgcagaatttgtttactgagccatggaggttacatttt

SEQ ID NO: 5145 - RNA, 138 nt, synthetic construct
  source 1..138: mol_type = other RNA; note = pegRNA
gtgtaacctccatggctcaggttttagagctagaaatagcaagttaaaataaggctagtccgttatcaacttgaaaaagtggcaccgagtcggtgcgtgaggattgcagaatttgttaactgagccatggaggttaca

SEQ ID NO: 5146 - RNA, 138 nt, synthetic construct
  source 1..138: mol_type = other RNA; note = pegRNA
gtgtaacctccatggctcaggttttagagctagaaatagcaagttaaaataaggctagtccgttatcaacttgaaaaagtggcaccgagtcggtgcgtgaggattgcagaatttgttaactgagccatggaggttttt

SEQ ID NO: 5147 - RNA, 138 nt, synthetic construct
  source 1..138: mol_type = other RNA; note = pegRNA
gtgtaacctccatggctcaggttttagagctagaaatagcaagttaaaataaggctagtccgttatcaacttgaaaaagtggcaccgagtcggtgcgtgaggattgcagaatttgttcactgagccatggaggttttt

SEQ ID NO: 5148 - RNA, 138 nt, synthetic construct
  source 1..138: mol_type = other RNA; note = pegRNA
gtgtaacctccatggctcaggttttagagctagaaatagcaagttaaaataaggctagtccgttatcaacttgaaaaagtggcaccgagtcggtgcgtgaggattgcagaatttgttgactgagccatggaggttaca

SEQ ID NO: 5149 - RNA, 138 nt, synthetic construct
  source 1..138: mol_type = other RNA; note = pegRNA
gtgtaacctccatggctcaggttttagagctagaaatagcaagttaaaataaggctagtccgttatcaacttgaaaaagtggcaccgagtcggtgcgtgaggattgcagaatttgttgactgagccatggaggttttt

SEQ ID NO: 5150 - RNA, 138 nt, synthetic construct
  source 1..138: mol_type = other RNA; note = pegRNA
gtgtaacctccatggctcaggttttagagctagaaatagcaagttaaaataaggctagtccgttatcaacttgaaaaagtggcaccgagtcggtgcgtgaggattgcagaatttgtttactgagccatggaggttaca

SEQ ID NO: 5151 - RNA, 138 nt, synthetic construct
  source 1..138: mol_type = other RNA; note = pegRNA
gtgtaacctccatggctcaggttttagagctagaaatagcaagttaaaataaggctagtccgttatcaacttgaaaaagtggcaccgagtcggtgcgtgaggattgcagaatttgtttactgagccatggaggttttt

SEQ ID NO: 5152 - RNA, 138 nt, synthetic construct
  source 1..138: mol_type = other RNA; note = pegRNA
gtgtaacctccatggctcaggttttagagctagaaatagcaagttaaaataaggctagtccgttatcaacttgaaaaagtggcaccgagtcggtgctgaggattgcagaatttgttaactgagccatggaggtttttt

SEQ ID NO: 5153 - RNA, 138 nt, synthetic construct
  source 1..138: mol_type = other RNA; note = pegRNA
gtgtaacctccatggctcaggttttagagctagaaatagcaagttaaaataaggctagtccgttatcaacttgaaaaagtggcaccgagtcggtgctgaggattgcagaatttgttgactgagccatggaggtttttt

SEQ ID NO: 5154 - RNA, 138 nt, synthetic construct
  source 1..138: mol_type = other RNA; note = pegRNA
gtgtaacctccatggctcaggttttagagctagaaatagcaagttaaaataaggctagtccgttatcaacttgaaaaagtggcaccgagtcggtgctgaggattgcagaatttgtttactgagccatggaggtttttt

SEQ ID NO: 5155 - RNA, 138 nt, synthetic construct
  source 1..138: mol_type = other RNA; note = pegRNA
gtgtaacctccatggctcaggttttagagctagaaatagcaagttaaaataaggctagtccgttatcaacttgaaaaagtggcaccgagtcggtgctgcccagagtgaggattgcagaatttgttaactgagccatgg

SEQ ID NO: 5156 - RNA, 138 nt, synthetic construct
  source 1..138: mol_type = other RNA; note = pegRNA
gtgtaacctccatggctcaggttttagagctagaaatagcaagttaaaataaggctagtccgttatcaacttgaaaaagtggcaccgagtcggtgctgcccagagtgaggattgcagaatttgttgactgagccatgg

SEQ ID NO: 5157 - RNA, 138 nt, synthetic construct
  source 1..138: mol_type = other RNA; note = pegRNA
gtgtaacctccatggctcaggttttagagctagaaatagcaagttaaaataaggctagtccgttatcaacttgaaaaagtggcaccgagtcggtgctgcccagagtgaggattgcagaatttgtttactgagccatgg

SEQ ID NO: 5158 - RNA, 139 nt, synthetic construct
  source 1..139: mol_type = other RNA; note = pegRNA
gtgtaacctccatggctcaggttttagagctagaaatagcaagttaaaataaggctagtccgttatcaacttgaaaaagtggcaccgagtcggtgcagagtgaggattgcagaatttgttaactgagccatggaggtta

SEQ ID NO: 5159 - RNA, 139 nt, synthetic construct
  source 1..139: mol_type = other RNA; note = pegRNA
gtgtaacctccatggctcaggttttagagctagaaatagcaagttaaaataaggctagtccgttatcaacttgaaaaagtggcaccgagtcggtgcagagtgaggattgcagaatttgttaactgagccatggagtttt

SEQ ID NO: 5160 - RNA, 139 nt, synthetic construct
  source 1..139: mol_type = other RNA; note = pegRNA
gtgtaacctccatggctcaggttttagagctagaaatagcaagttaaaataaggctagtccgttatcaacttgaaaaagtggcaccgagtcggtgcagagtgaggattgcagaatttgttgactgagccatggaggtta

SEQ ID NO: 5161 - RNA, 139 nt, synthetic construct
  source 1..139: mol_type = other RNA; note = pegRNA
gtgtaacctccatggctcaggttttagagctagaaatagcaagttaaaataaggctagtccgttatcaacttgaaaaagtggcaccgagtcggtgcagagtgaggattgcagaatttgttgactgagccatggagtttt

SEQ ID NO: 5162 - RNA, 139 nt, synthetic construct
  source 1..139: mol_type = other RNA; note = pegRNA
gtgtaacctccatggctcaggttttagagctagaaatagcaagttaaaataaggctagtccgttatcaacttgaaaaagtggcaccgagtcggtgcagagtgaggattgcagaatttgtttactgagccatggaggtta

SEQ ID NO: 5163 - RNA, 139 nt, synthetic construct
  source 1..139: mol_type = other RNA; note = pegRNA
gtgtaacctccatggctcaggttttagagctagaaatagcaagttaaaataaggctagtccgttatcaacttgaaaaagtggcaccgagtcggtgcagagtgaggattgcagaatttgtttactgagccatggagtttt

SEQ ID NO: 5164 - RNA, 139 nt, synthetic construct
  source 1..139: mol_type = other RNA; note = pegRNA
gtgtaacctccatggctcaggttttagagctagaaatagcaagttaaaataaggctagtccgttatcaacttgaaaaagtggcaccgagtcggtgcaggattgcagaatttgttaactgagccatggaggttacatttt

SEQ ID NO: 5165 - RNA, 139 nt, synthetic construct
  source 1..139: mol_type = other RNA; note = pegRNA
gtgtaacctccatggctcaggttttagagctagaaatagcaagttaaaataaggctagtccgttatcaacttgaaaaagtggcaccgagtcggtgcaggattgcagaatttgttgactgagccatggaggttacatttt

SEQ ID NO: 5166 - RNA, 139 nt, synthetic construct
  source 1..139: mol_type = other RNA; note = pegRNA
gtgtaacctccatggctcaggttttagagctagaaatagcaagttaaaataaggctagtccgttatcaacttgaaaaagtggcaccgagtcggtgcaggattgcagaatttgtttactgagccatggaggttacatttt

SEQ ID NO: 5167 - RNA, 139 nt, synthetic construct
  source 1..139: mol_type = other RNA; note = pegRNA
gtgtaacctccatggctcaggttttagagctagaaatagcaagttaaaataaggctagtccgttatcaacttgaaaaagtggcaccgagtcggtgcagtgaggattgcagaatttgttaactgagccatggaggttaca

SEQ ID NO: 5168 - RNA, 139 nt, synthetic construct
  source 1..139: mol_type = other RNA; note = pegRNA
gtgtaacctccatggctcaggttttagagctagaaatagcaagttaaaataaggctagtccgttatcaacttgaaaaagtggcaccgagtcggtgcagtgaggattgcagaatttgttaactgagccatggaggttttt

SEQ ID NO: 5169 - RNA, 139 nt, synthetic construct
  source 1..139: mol_type = other RNA; note = pegRNA
gtgtaacctccatggctcaggttttagagctagaaatagcaagttaaaataaggctagtccgttatcaacttgaaaaagtggcaccgagtcggtgcagtgaggattgcagaatttgttgactgagccatggaggttaca

SEQ ID NO: 5170 - RNA, 139 nt, synthetic construct
  source 1..139: mol_type = other RNA; note = pegRNA
gtgtaacctccatggctcaggttttagagctagaaatagcaagttaaaataaggctagtccgttatcaacttgaaaaagtggcaccgagtcggtgcagtgaggattgcagaatttgttgactgagccatggaggttttt

SEQ ID NO: 5171 - RNA, 139 nt, synthetic construct
  source 1..139: mol_type = other RNA; note = pegRNA
gtgtaacctccatggctcaggttttagagctagaaatagcaagttaaaataaggctagtccgttatcaacttgaaaaagtggcaccgagtcggtgcagtgaggattgcagaatttgtttactgagccatggaggttaca

SEQ ID NO: 5172 - RNA, 139 nt, synthetic construct
  source 1..139: mol_type = other RNA; note = pegRNA
gtgtaacctccatggctcaggttttagagctagaaatagcaagttaaaataaggctagtccgttatcaacttgaaaaagtggcaccgagtcggtgcagtgaggattgcagaatttgtttactgagccatggaggttttt

SEQ ID NO: 5173 - RNA, 139 nt, synthetic construct
  source 1..139: mol_type = other RNA; note = pegRNA
gtgtaacctccatggctcaggttttagagctagaaatagcaagttaaaataaggctagtccgttatcaacttgaaaaagtggcaccgagtcggtgccagagtgaggattgcagaatttgttaactgagccatggaggtt

SEQ ID NO: 5174 - RNA, 139 nt, synthetic construct
  source 1..139: mol_type = other RNA; note = pegRNA
gtgtaacctccatggctcaggttttagagctagaaatagcaagttaaaataaggctagtccgttatcaacttgaaaaagtggcaccgagtcggtgccagagtgaggattgcagaatttgttaactgagccatggatttt

SEQ ID NO: 5175 - RNA, 139 nt, synthetic construct
  source 1..139: mol_type = other RNA; note = pegRNA
gtgtaacctccatggctcaggttttagagctagaaatagcaagttaaaataaggctagtccgttatcaacttgaaaaagtggcaccgagtcggtgccagagtgaggattgcagaatttgttgactgagccatggaggtt

SEQ ID NO: 5176 - RNA, 139 nt, synthetic construct
  source 1..139: mol_type = other RNA; note = pegRNA
gtgtaacctccatggctcaggttttagagctagaaatagcaagttaaaataaggctagtccgttatcaacttgaaaaagtggcaccgagtcggtgccagagtgaggattgcagaatttgttgactgagccatggatttt

SEQ ID NO: 5177 - RNA, 139 nt, synthetic construct
  source 1..139: mol_type = other RNA; note = pegRNA
gtgtaacctccatggctcaggttttagagctagaaatagcaagttaaaataaggctagtccgttatcaacttgaaaaagtggcaccgagtcggtgccagagtgaggattgcagaatttgtttactgagccatggaggtt

SEQ ID NO: 5178 - RNA, 139 nt, synthetic construct
  source 1..139: mol_type = other RNA; note = pegRNA
gtgtaacctccatggctcaggttttagagctagaaatagcaagttaaaataaggctagtccgttatcaacttgaaaaagtggcaccgagtcggtgccagagtgaggattgcagaatttgtttactgagccatggatttt

SEQ ID NO: 5179 - RNA, 139 nt, synthetic construct
  source 1..139: mol_type = other RNA; note = pegRNA
gtgtaacctccatggctcaggttttagagctagaaatagcaagttaaaataaggctagtccgttatcaacttgaaaaagtggcaccgagtcggtgcccagagtgaggattgcagaatttgttaactgagccatggaggt

SEQ ID NO: 5180 - RNA, 139 nt, synthetic construct
  source 1..139: mol_type = other RNA; note = pegRNA
gtgtaacctccatggctcaggttttagagctagaaatagcaagttaaaataaggctagtccgttatcaacttgaaaaagtggcaccgagtcggtgcccagagtgaggattgcagaatttgttaactgagccatggtttt

SEQ ID NO: 5181 - RNA, 139 nt, synthetic construct
  source 1..139: mol_type = other RNA; note = pegRNA
gtgtaacctccatggctcaggttttagagctagaaatagcaagttaaaataaggctagtccgttatcaacttgaaaaagtggcaccgagtcggtgcccagagtgaggattgcagaatttgttgactgagccatggaggt

SEQ ID NO: 5182 - RNA, 139 nt, synthetic construct
  source 1..139: mol_type = other RNA; note = pegRNA
gtgtaacctccatggctcaggttttagagctagaaatagcaagttaaaataaggctagtccgttatcaacttgaaaaagtggcaccgagtcggtgcccagagtgaggattgcagaatttgttgactgagccatggtttt

SEQ ID NO: 5183 - RNA, 139 nt, synthetic construct
  source 1..139: mol_type = other RNA; note = pegRNA
gtgtaacctccatggctcaggttttagagctagaaatagcaagttaaaataaggctagtccgttatcaacttgaaaaagtggcaccgagtcggtgcccagagtgaggattgcagaatttgtttactgagccatggaggt

SEQ ID NO: 5184 - RNA, 139 nt, synthetic construct
  source 1..139: mol_type = other RNA; note = pegRNA
gtgtaacctccatggctcaggttttagagctagaaatagcaagttaaaataaggctagtccgttatcaacttgaaaaagtggcaccgagtcggtgcccagagtgaggattgcagaatttgtttactgagccatggtttt

SEQ ID NO: 5185 - RNA, 139 nt, synthetic construct
  source 1..139: mol_type = other RNA; note = pegRNA
gtgtaacctccatggctcaggttttagagctagaaatagcaagttaaaataaggctagtccgttatcaacttgaaaaagtggcaccgagtcggtgccccagagtgaggattgcagaatttgttaactgagccatggagg

SEQ ID NO: 5186 - RNA, 139 nt, synthetic construct
  source 1..139: mol_type = other RNA; note = pegRNA
gtgtaacctccatggctcaggttttagagctagaaatagcaagttaaaataaggctagtccgttatcaacttgaaaaagtggcaccgagtcggtgccccagagtgaggattgcagaatttgttgactgagccatggagg

SEQ ID NO: 5187 - RNA, 139 nt, synthetic construct
  source 1..139: mol_type = other RNA; note = pegRNA
gtgtaacctccatggctcaggttttagagctagaaatagcaagttaaaataaggctagtccgttatcaacttgaaaaagtggcaccgagtcggtgccccagagtgaggattgcagaatttgtttactgagccatggagg

SEQ ID NO: 5188 - RNA, 139 nt, synthetic construct
  source 1..139: mol_type = other RNA; note = pegRNA
gtgtaacctccatggctcaggttttagagctagaaatagcaagttaaaataaggctagtccgttatcaacttgaaaaagtggcaccgagtcggtgcctgcccagagtgaggattgcagaatttgttaactgagccatgg

SEQ ID NO: 5189 - RNA, 139 nt, synthetic construct
  source 1..139: mol_type = other RNA; note = pegRNA
gtgtaacctccatggctcaggttttagagctagaaatagcaagttaaaataaggctagtccgttatcaacttgaaaaagtggcaccgagtcggtgcctgcccagagtgaggattgcagaatttgttgactgagccatgg

SEQ ID NO: 5190 - RNA, 139 nt, synthetic construct
  source 1..139: mol_type = other RNA; note = pegRNA
gtgtaacctccatggctcaggttttagagctagaaatagcaagttaaaataaggctagtccgttatcaacttgaaaaagtggcaccgagtcggtgcctgcccagagtgaggattgcagaatttgtttactgagccatgg

SEQ ID NO: 5191 - RNA, 139 nt, synthetic construct
  source 1..139: mol_type = other RNA; note = pegRNA
gtgtaacctccatggctcaggttttagagctagaaatagcaagttaaaataaggctagtccgttatcaacttgaaaaagtggcaccgagtcggtgcgaggattgcagaatttgttaactgagccatggaggttactttt

SEQ ID NO: 5192 - RNA, 139 nt, synthetic construct
  source 1..139: mol_type = other RNA; note = pegRNA
gtgtaacctccatggctcaggttttagagctagaaatagcaagttaaaataaggctagtccgttatcaacttgaaaaagtggcaccgagtcggtgcgaggattgcagaatttgttgactgagccatggaggttactttt

SEQ ID NO: 5193 - RNA, 139 nt, synthetic construct
  source 1..139: mol_type = other RNA; note = pegRNA
gtgtaacctccatggctcaggttttagagctagaaatagcaagttaaaataaggctagtccgttatcaacttgaaaaagtggcaccgagtcggtgcgaggattgcagaatttgtttactgagccatggaggttactttt

SEQ ID NO: 5194 - RNA, 139 nt, synthetic construct
  source 1..139: mol_type = other RNA; note = pegRNA
gtgtaacctccatggctcaggttttagagctagaaatagcaagttaaaataaggctagtccgttatcaacttgaaaaagtggcaccgagtcggtgcgagtgaggattgcagaatttgttaactgagccatggaggttac

SEQ ID NO: 5195 - RNA, 139 nt, synthetic construct
  source 1..139: mol_type = other RNA; note = pegRNA
gtgtaacctccatggctcaggttttagagctagaaatagcaagttaaaataaggctagtccgttatcaacttgaaaaagtggcaccgagtcggtgcgagtgaggattgcagaatttgttaactgagccatggaggtttt

SEQ ID NO: 5196 - RNA, 139 nt, synthetic construct
  source 1..139: mol_type = other RNA; note = pegRNA
gtgtaacctccatggctcaggttttagagctagaaatagcaagttaaaataaggctagtccgttatcaacttgaaaaagtggcaccgagtcggtgcgagtgaggattgcagaatttgttgactgagccatggaggttac

SEQ ID NO: 5197 - RNA, 139 nt, synthetic construct
  source 1..139: mol_type = other RNA; note = pegRNA
gtgtaacctccatggctcaggttttagagctagaaatagcaagttaaaataaggctagtccgttatcaacttgaaaaagtggcaccgagtcggtgcgagtgaggattgcagaatttgttgactgagccatggaggtttt

SEQ ID NO: 5198 - RNA, 139 nt, synthetic construct
  source 1..139: mol_type = other RNA; note = pegRNA
gtgtaacctccatggctcaggttttagagctagaaatagcaagttaaaataaggctagtccgttatcaacttgaaaaagtggcaccgagtcggtgcgagtgaggattgcagaatttgtttactgagccatggaggttac

SEQ ID NO: 5199 - RNA, 139 nt, synthetic construct
  source 1..139: mol_type = other RNA; note = pegRNA
gtgtaacctccatggctcaggttttagagctagaaatagcaagttaaaataaggctagtccgttatcaacttgaaaaagtggcaccgagtcggtgcgagtgaggattgcagaatttgtttactgagccatggaggtttt

SEQ ID NO: 5200 - RNA, 139 nt, synthetic construct
  source 1..139: mol_type = other RNA; note = pegRNA
gtgtaacctccatggctcaggttttagagctagaaatagcaagttaaaataaggctagtccgttatcaacttgaaaaagtggcaccgagtcggtgcgcccagagtgaggattgcagaatttgttaactgagccatggag

SEQ ID NO: 5201 - RNA, 139 nt, synthetic construct
  source 1..139: mol_type = other RNA; note = pegRNA
gtgtaacctccatggctcaggttttagagctagaaatagcaagttaaaataaggctagtccgttatcaacttgaaaaagtggcaccgagtcggtgcgcccagagtgaggattgcagaatttgttgactgagccatggag

SEQ ID NO: 5202 - RNA, 139 nt, synthetic construct
  source 1..139: mol_type = other RNA; note = pegRNA
gtgtaacctccatggctcaggttttagagctagaaatagcaagttaaaataaggctagtccgttatcaacttgaaaaagtggcaccgagtcggtgcgcccagagtgaggattgcagaatttgtttactgagccatggag

SEQ ID NO: 5203 - RNA, 139 nt, synthetic construct
  source 1..139: mol_type = other RNA; note = pegRNA
gtgtaacctccatggctcaggttttagagctagaaatagcaagttaaaataaggctagtccgttatcaacttgaaaaagtggcaccgagtcggtgcgtgaggattgcagaatttgttaactgagccatggaggtttttt

SEQ ID NO: 5204 - RNA, 139 nt, synthetic construct
  source 1..139: mol_type = other RNA; note = pegRNA
gtgtaacctccatggctcaggttttagagctagaaatagcaagttaaaataaggctagtccgttatcaacttgaaaaagtggcaccgagtcggtgcgtgaggattgcagaatttgttgactgagccatggaggtttttt

SEQ ID NO: 5205 - RNA, 139 nt, synthetic construct
  source 1..139: mol_type = other RNA; note = pegRNA
gtgtaacctccatggctcaggttttagagctagaaatagcaagttaaaataaggctagtccgttatcaacttgaaaaagtggcaccgagtcggtgcgtgaggattgcagaatttgtttactgagccatggaggtttttt

SEQ ID NO: 5206 - RNA, 139 nt, synthetic construct
  source 1..139: mol_type = other RNA; note = pegRNA
gtgtaacctccatggctcaggttttagagctagaaatagcaagttaaaataaggctagtccgttatcaacttgaaaaagtggcaccgagtcggtgctgaggattgcagaatttgttaactgagccatggaggttatttt

SEQ ID NO: 5207 - RNA, 139 nt, synthetic construct
  source 1..139: mol_type = other RNA; note = pegRNA
gtgtaacctccatggctcaggttttagagctagaaatagcaagttaaaataaggctagtccgttatcaacttgaaaaagtggcaccgagtcggtgctgaggattgcagaatttgttgactgagccatggaggttatttt

SEQ ID NO: 5208 - RNA, 139 nt, synthetic construct
  source 1..139: mol_type = other RNA; note = pegRNA
gtgtaacctccatggctcaggttttagagctagaaatagcaagttaaaataaggctagtccgttatcaacttgaaaaagtggcaccgagtcggtgctgaggattgcagaatttgtttactgagccatggaggttatttt

SEQ ID NO: 5209 - RNA, 139 nt, synthetic construct
  source 1..139: mol_type = other RNA; note = pegRNA
gtgtaacctccatggctcaggttttagagctagaaatagcaagttaaaataaggctagtccgttatcaacttgaaaaagtggcaccgagtcggtgctgcccagagtgaggattgcagaatttgttaactgagccatgga

SEQ ID NO: 5210 - RNA, 139 nt, synthetic construct
  source 1..139: mol_type = other RNA; note = pegRNA
gtgtaacctccatggctcaggttttagagctagaaatagcaagttaaaataaggctagtccgttatcaacttgaaaaagtggcaccgagtcggtgctgcccagagtgaggattgcagaatttgttgactgagccatgga

SEQ ID NO: 5211 - RNA, 139 nt, synthetic construct
  source 1..139: mol_type = other RNA; note = pegRNA
gtgtaacctccatggctcaggttttagagctagaaatagcaagttaaaataaggctagtccgttatcaacttgaaaaagtggcaccgagtcggtgctgcccagagtgaggattgcagaatttgtttactgagccatgga

SEQ ID NO: 5212 - RNA, 140 nt, synthetic construct
  source 1..140: mol_type = other RNA; note = pegRNA
gtgtaacctccatggctcaggttttagagctagaaatagcaagttaaaataaggctagtccgttatcaacttgaaaaagtggcaccgagtcggtgcactgcccagagtgaggattgcagaatttgttaactgagccatgg

SEQ ID NO: 5213 - RNA, 140 nt, synthetic construct
  source 1..140: mol_type = other RNA; note = pegRNA
gtgtaacctccatggctcaggttttagagctagaaatagcaagttaaaataaggctagtccgttatcaacttgaaaaagtggcaccgagtcggtgcactgcccagagtgaggattgcagaatttgttgactgagccatgg

SEQ ID NO: 5214 - RNA, 140 nt, synthetic construct
  source 1..140: mol_type = other RNA; note = pegRNA
gtgtaacctccatggctcaggttttagagctagaaatagcaagttaaaataaggctagtccgttatcaacttgaaaaagtggcaccgagtcggtgcactgcccagagtgaggattgcagaatttgtttactgagccatgg

SEQ ID NO: 5215 - RNA, 140 nt, synthetic construct
  source 1..140: mol_type = other RNA; note = pegRNA
gtgtaacctccatggctcaggttttagagctagaaatagcaagttaaaataaggctagtccgttatcaacttgaaaaagtggcaccgagtcggtgcagagtgaggattgcagaatttgttaactgagccatggaggttac

SEQ ID NO: 5216 - RNA, 140 nt, synthetic construct
  source 1..140: mol_type = other RNA; note = pegRNA
gtgtaacctccatggctcaggttttagagctagaaatagcaagttaaaataaggctagtccgttatcaacttgaaaaagtggcaccgagtcggtgcagagtgaggattgcagaatttgttaactgagccatggaggtttt

SEQ ID NO: 5217 - RNA, 140 nt, synthetic construct
  source 1..140: mol_type = other RNA; note = pegRNA
gtgtaacctccatggctcaggttttagagctagaaatagcaagttaaaataaggctagtccgttatcaacttgaaaaagtggcaccgagtcggtgcagagtgaggattgcagaatttgttgactgagccatggaggttac

SEQ ID NO: 5218 - RNA, 140 nt, synthetic construct
  source 1..140: mol_type = other RNA; note = pegRNA
gtgtaacctccatggctcaggttttagagctagaaatagcaagttaaaataaggctagtccgttatcaacttgaaaaagtggcaccgagtcggtgcagagtgaggattgcagaatttgttgactgagccatggaggtttt

SEQ ID NO: 5219 - RNA, 140 nt, synthetic construct
  source 1..140: mol_type = other RNA; note = pegRNA
gtgtaacctccatggctcaggttttagagctagaaatagcaagttaaaataaggctagtccgttatcaacttgaaaaagtggcaccgagtcggtgcagagtgaggattgcagaatttgtttactgagccatggaggttac

SEQ ID NO: 5220 - RNA, 140 nt, synthetic construct
  source 1..140: mol_type = other RNA; note = pegRNA
gtgtaacctccatggctcaggttttagagctagaaatagcaagttaaaataaggctagtccgttatcaacttgaaaaagtggcaccgagtcggtgcagagtgaggattgcagaatttgtttactgagccatggaggtttt

SEQ ID NO: 5221 - RNA, 140 nt, synthetic construct
  source 1..140: mol_type = other RNA; note = pegRNA
gtgtaacctccatggctcaggttttagagctagaaatagcaagttaaaataaggctagtccgttatcaacttgaaaaagtggcaccgagtcggtgcagtgaggattgcagaatttgttaactgagccatggaggtttttt

SEQ ID NO: 5222 - RNA, 140 nt, synthetic construct
  source 1..140: mol_type = other RNA; note = pegRNA
gtgtaacctccatggctcaggttttagagctagaaatagcaagttaaaataaggctagtccgttatcaacttgaaaaagtggcaccgagtcggtgcagtgaggattgcagaatttgttgactgagccatggaggtttttt

SEQ ID NO: 5223 - RNA, 140 nt, synthetic construct
  source 1..140: mol_type = other RNA; note = pegRNA
gtgtaacctccatggctcaggttttagagctagaaatagcaagttaaaataaggctagtccgttatcaacttgaaaaagtggcaccgagtcggtgcagtgaggattgcagaatttgtttactgagccatggaggtttttt

SEQ ID NO: 5224 - RNA, 140 nt, synthetic construct
  source 1..140: mol_type = other RNA; note = pegRNA
gtgtaacctccatggctcaggttttagagctagaaatagcaagttaaaataaggctagtccgttatcaacttgaaaaagtggcaccgagtcggtgccagagtgaggattgcagaatttgttaactgagccatggaggtta

SEQ ID NO: 5225 - RNA, 140 nt, synthetic construct
  source 1..140: mol_type = other RNA; note = pegRNA
gtgtaacctccatggctcaggttttagagctagaaatagcaagttaaaataaggctagtccgttatcaacttgaaaaagtggcaccgagtcggtgccagagtgaggattgcagaatttgttaactgagccatggagtttt

SEQ ID NO: 5226 - RNA, 140 nt, synthetic construct
  source 1..140: mol_type = other RNA; note = pegRNA
gtgtaacctccatggctcaggttttagagctagaaatagcaagttaaaataaggctagtccgttatcaacttgaaaaagtggcaccgagtcggtgccagagtgaggattgcagaatttgttgactgagccatggaggtta

SEQ ID NO: 5227 - RNA, 140 nt, synthetic construct
  source 1..140: mol_type = other RNA; note = pegRNA
gtgtaacctccatggctcaggttttagagctagaaatagcaagttaaaataaggctagtccgttatcaacttgaaaaagtggcaccgagtcggtgccagagtgaggattgcagaatttgttgactgagccatggagtttt

SEQ ID NO: 5228 - RNA, 140 nt, synthetic construct
  source 1..140: mol_type = other RNA; note = pegRNA
gtgtaacctccatggctcaggttttagagctagaaatagcaagttaaaataaggctagtccgttatcaacttgaaaaagtggcaccgagtcggtgccagagtgaggattgcagaatttgtttactgagccatggaggtta

SEQ ID NO: 5229 - RNA, 140 nt, synthetic construct
  source 1..140: mol_type = other RNA; note = pegRNA
gtgtaacctccatggctcaggttttagagctagaaatagcaagttaaaataaggctagtccgttatcaacttgaaaaagtggcaccgagtcggtgccagagtgaggattgcagaatttgtttactgagccatggagtttt

SEQ ID NO: 5230 - RNA, 140 nt, synthetic construct
  source 1..140: mol_type = other RNA; note = pegRNA
gtgtaacctccatggctcaggttttagagctagaaatagcaagttaaaataaggctagtccgttatcaacttgaaaaagtggcaccgagtcggtgcccagagtgaggattgcagaatttgttaactgagccatggaggtt

SEQ ID NO: 5231 - RNA, 140 nt, synthetic construct
  source 1..140: mol_type = other RNA; note = pegRNA
gtgtaacctccatggctcaggttttagagctagaaatagcaagttaaaataaggctagtccgttatcaacttgaaaaagtggcaccgagtcggtgcccagagtgaggattgcagaatttgttaactgagccatggatttt

SEQ ID NO: 5232 - RNA, 140 nt, synthetic construct
  source 1..140: mol_type = other RNA; note = pegRNA
gtgtaacctccatggctcaggttttagagctagaaatagcaagttaaaataaggctagtccgttatcaacttgaaaaagtggcaccgagtcggtgcccagagtgaggattgcagaatttgttgactgagccatggaggtt

SEQ ID NO: 5233 - RNA, 140 nt, synthetic construct
  source 1..140: mol_type = other RNA; note = pegRNA
gtgtaacctccatggctcaggttttagagctagaaatagcaagttaaaataaggctagtccgttatcaacttgaaaaagtggcaccgagtcggtgcccagagtgaggattgcagaatttgttgactgagccatggatttt

SEQ ID NO: 5234 - RNA, 140 nt, synthetic construct
  source 1..140: mol_type = other RNA; note = pegRNA
gtgtaacctccatggctcaggttttagagctagaaatagcaagttaaaataaggctagtccgttatcaacttgaaaaagtggcaccgagtcggtgcccagagtgaggattgcagaatttgtttactgagccatggaggtt

SEQ ID NO: 5235 - RNA, 140 nt, synthetic construct
  source 1..140: mol_type = other RNA; note = pegRNA
gtgtaacctccatggctcaggttttagagctagaaatagcaagttaaaataaggctagtccgttatcaacttgaaaaagtggcaccgagtcggtgcccagagtgaggattgcagaatttgtttactgagccatggatttt

SEQ ID NO: 5236 - RNA, 140 nt, synthetic construct
  source 1..140: mol_type = other RNA; note = pegRNA
gtgtaacctccatggctcaggttttagagctagaaatagcaagttaaaataaggctagtccgttatcaacttgaaaaagtggcaccgagtcggtgccccagagtgaggattgcagaatttgttaactgagccatggaggt

SEQ ID NO: 5237 - RNA, 140 nt, synthetic construct
  source 1..140: mol_type = other RNA; note = pegRNA
gtgtaacctccatggctcaggttttagagctagaaatagcaagttaaaataaggctagtccgttatcaacttgaaaaagtggcaccgagtcggtgccccagagtgaggattgcagaatttgttaactgagccatggtttt

SEQ ID NO: 5238 - RNA, 140 nt, synthetic construct
  source 1..140: mol_type = other RNA; note = pegRNA
gtgtaacctccatggctcaggttttagagctagaaatagcaagttaaaataaggctagtccgttatcaacttgaaaaagtggcaccgagtcggtgccccagagtgaggattgcagaatttgttgactgagccatggaggt

SEQ ID NO: 5239 - RNA, 140 nt, synthetic construct
  source 1..140: mol_type = other RNA; note = pegRNA
gtgtaacctccatggctcaggttttagagctagaaatagcaagttaaaataaggctagtccgttatcaacttgaaaaagtggcaccgagtcggtgccccagagtgaggattgcagaatttgttgactgagccatggtttt

SEQ ID NO: 5240 - RNA, 140 nt, synthetic construct
  source 1..140: mol_type = other RNA; note = pegRNA
gtgtaacctccatggctcaggttttagagctagaaatagcaagttaaaataaggctagtccgttatcaacttgaaaaagtggcaccgagtcggtgccccagagtgaggattgcagaatttgtttactgagccatggaggt

SEQ ID NO: 5241 - RNA, 140 nt, synthetic construct
  source 1..140: mol_type = other RNA; note = pegRNA
gtgtaacctccatggctcaggttttagagctagaaatagcaagttaaaataaggctagtccgttatcaacttgaaaaagtggcaccgagtcggtgccccagagtgaggattgcagaatttgtttactgagccatggtttt

SEQ ID NO: 5242 - RNA, 140 nt, synthetic construct
  source 1..140: mol_type = other RNA; note = pegRNA
gtgtaacctccatggctcaggttttagagctagaaatagcaagttaaaataaggctagtccgttatcaacttgaaaaagtggcaccgagtcggtgcctgcccagagtgaggattgcagaatttgttaactgagccatgga

SEQ ID NO: 5243 - RNA, 140 nt, synthetic construct
  source 1..140: mol_type = other RNA; note = pegRNA
gtgtaacctccatggctcaggttttagagctagaaatagcaagttaaaataaggctagtccgttatcaacttgaaaaagtggcaccgagtcggtgcctgcccagagtgaggattgcagaatttgttgactgagccatgga

SEQ ID NO: 5244 - RNA, 140 nt, synthetic construct
  source 1..140: mol_type = other RNA; note = pegRNA
gtgtaacctccatggctcaggttttagagctagaaatagcaagttaaaataaggctagtccgttatcaacttgaaaaagtggcaccgagtcggtgcctgcccagagtgaggattgcagaatttgtttactgagccatgga

SEQ ID NO: 5245 - RNA, 140 nt, synthetic construct
  source 1..140: mol_type = other RNA; note = pegRNA
gtgtaacctccatggctcaggttttagagctagaaatagcaagttaaaataaggctagtccgttatcaacttgaaaaagtggcaccgagtcggtgcgaggattgcagaatttgttaactgagccatggaggttacatttt

SEQ ID NO: 5246 - RNA, 140 nt, synthetic construct
  source 1..140: mol_type = other RNA; note = pegRNA
gtgtaacctccatggctcaggttttagagctagaaatagcaagttaaaataaggctagtccgttatcaacttgaaaaagtggcaccgagtcggtgcgaggattgcagaatttgttgactgagccatggaggttacatttt

SEQ ID NO: 5247 - RNA, 140 nt, synthetic construct
  source 1..140: mol_type = other RNA; note = pegRNA
gtgtaacctccatggctcaggttttagagctagaaatagcaagttaaaataaggctagtccgttatcaacttgaaaaagtggcaccgagtcggtgcgaggattgcagaatttgtttactgagccatggaggttacatttt

SEQ ID NO: 5248 - RNA, 140 nt, synthetic construct
  source 1..140: mol_type = other RNA; note = pegRNA
gtgtaacctccatggctcaggttttagagctagaaatagcaagttaaaataaggctagtccgttatcaacttgaaaaagtggcaccgagtcggtgcgagtgaggattgcagaatttgttaactgagccatggaggttaca

SEQ ID NO: 5249 - RNA, 140 nt, synthetic construct
  source 1..140: mol_type = other RNA; note = pegRNA
gtgtaacctccatggctcaggttttagagctagaaatagcaagttaaaataaggctagtccgttatcaacttgaaaaagtggcaccgagtcggtgcgagtgaggattgcagaatttgttaactgagccatggaggttttt

SEQ ID NO: 5250 - RNA, 140 nt, synthetic construct
  source 1..140: mol_type = other RNA; note = pegRNA
gtgtaacctccatggctcaggttttagagctagaaatagcaagttaaaataaggctagtccgttatcaacttgaaaaagtggcaccgagtcggtgcgagtgaggattgcagaatttgttgactgagccatggaggttaca

SEQ ID NO: 5251 - RNA, 140 nt, synthetic construct
  source 1..140: mol_type = other RNA; note = pegRNA
gtgtaacctccatggctcaggttttagagctagaaatagcaagttaaaataaggctagtccgttatcaacttgaaaaagtggcaccgagtcggtgcgagtgaggattgcagaatttgttgactgagccatggaggttttt

SEQ ID NO: 5252 - RNA, 140 nt, synthetic construct
  source 1..140: mol_type = other RNA; note = pegRNA
gtgtaacctccatggctcaggttttagagctagaaatagcaagttaaaataaggctagtccgttatcaacttgaaaaagtggcaccgagtcggtgcgagtgaggattgcagaatttgtttactgagccatggaggttaca

SEQ ID NO: 5253 - RNA, 140 nt, synthetic construct
  source 1..140: mol_type = other RNA; note = pegRNA
gtgtaacctccatggctcaggttttagagctagaaatagcaagttaaaataaggctagtccgttatcaacttgaaaaagtggcaccgagtcggtgcgagtgaggattgcagaatttgtttactgagccatggaggttttt

SEQ ID NO: 5254 - RNA, 140 nt, synthetic construct
  source 1..140: mol_type = other RNA; note = pegRNA
gtgtaacctccatggctcaggttttagagctagaaatagcaagttaaaataaggctagtccgttatcaacttgaaaaagtggcaccgagtcggtgcgcccagagtgaggattgcagaatttgttaactgagccatggagg

SEQ ID NO: 5255 - RNA, 140 nt, synthetic construct
  source 1..140: mol_type = other RNA; note = pegRNA
gtgtaacctccatggctcaggttttagagctagaaatagcaagttaaaataaggctagtccgttatcaacttgaaaaagtggcaccgagtcggtgcgcccagagtgaggattgcagaatttgttgactgagccatggagg

SEQ ID NO: 5256 - RNA, 140 nt, synthetic construct
  source 1..140: mol_type = other RNA; note = pegRNA
gtgtaacctccatggctcaggttttagagctagaaatagcaagttaaaataaggctagtccgttatcaacttgaaaaagtggcaccgagtcggtgcgcccagagtgaggattgcagaatttgtttactgagccatggagg

SEQ ID NO: 5257 - RNA, 140 nt, synthetic construct
  source 1..140: mol_type = other RNA; note = pegRNA
gtgtaacctccatggctcaggttttagagctagaaatagcaagttaaaataaggctagtccgttatcaacttgaaaaagtggcaccgagtcggtgcgtgaggattgcagaatttgttaactgagccatggaggttatttt

SEQ ID NO: 5258 - RNA, 140 nt, synthetic construct
  source 1..140: mol_type = other RNA; note = pegRNA
gtgtaacctccatggctcaggttttagagctagaaatagcaagttaaaataaggctagtccgttatcaacttgaaaaagtggcaccgagtcggtgcgtgaggattgcagaatttgttcactgagccatggaggttatttt

SEQ ID NO: 5259 - RNA, 140 nt, synthetic construct
  source 1..140: mol_type = other RNA; note = pegRNA
gtgtaacctccatggctcaggttttagagctagaaatagcaagttaaaataaggctagtccgttatcaacttgaaaaagtggcaccgagtcggtgcgtgaggattgcagaatttgttgactgagccatggaggttatttt

SEQ ID NO: 5260 - RNA, 140 nt, synthetic construct
  source 1..140: mol_type = other RNA; note = pegRNA
gtgtaacctccatggctcaggttttagagctagaaatagcaagttaaaataaggctagtccgttatcaacttgaaaaagtggcaccgagtcggtgcgtgaggattgcagaatttgtttactgagccatggaggttatttt

SEQ ID NO: 5261 - RNA, 140 nt, synthetic construct
  source 1..140: mol_type = other RNA; note = pegRNA
gtgtaacctccatggctcaggttttagagctagaaatagcaagttaaaataaggctagtccgttatcaacttgaaaaagtggcaccgagtcggtgctgaggattgcagaatttgttaactgagccatggaggttactttt

SEQ ID NO: 5262 - RNA, 140 nt, synthetic construct
  source 1..140: mol_type = other RNA; note = pegRNA
gtgtaacctccatggctcaggttttagagctagaaatagcaagttaaaataaggctagtccgttatcaacttgaaaaagtggcaccgagtcggtgctgaggattgcagaatttgttgactgagccatggaggttactttt

SEQ ID NO: 5263 - RNA, 140 nt, synthetic construct
  source 1..140: mol_type = other RNA; note = pegRNA
gtgtaacctccatggctcaggttttagagctagaaatagcaagttaaaataaggctagtccgttatcaacttgaaaaagtggcaccgagtcggtgctgaggattgcagaatttgtttactgagccatggaggttactttt

SEQ ID NO: 5264 - RNA, 140 nt, synthetic construct
  source 1..140: mol_type = other RNA; note = pegRNA
gtgtaacctccatggctcaggttttagagctagaaatagcaagttaaaataaggctagtccgttatcaacttgaaaaagtggcaccgagtcggtgctgcccagagtgaggattgcagaatttgttaactgagccatggag

SEQ ID NO: 5265 - RNA, 140 nt, synthetic construct
  source 1..140: mol_type = other RNA; note = pegRNA
gtgtaacctccatggctcaggttttagagctagaaatagcaagttaaaataaggctagtccgttatcaacttgaaaaagtggcaccgagtcggtgctgcccagagtgaggattgcagaatttgttgactgagccatggag

SEQ ID NO: 5266 - RNA, 140 nt, synthetic construct
  source 1..140: mol_type = other RNA; note = pegRNA
gtgtaacctccatggctcaggttttagagctagaaatagcaagttaaaataaggctagtccgttatcaacttgaaaaagtggcaccgagtcggtgctgcccagagtgaggattgcagaatttgtttactgagccatggag

SEQ ID NO: 5267 - RNA, 141 nt, synthetic construct
  source 1..141: mol_type = other RNA; note = pegRNA
gtgtaacctccatggctcaggttttagagctagaaatagcaagttaaaataaggctagtccgttatcaacttgaaaaagtggcaccgagtcggtgcactgcccagagtgaggattgcagaatttgttaactgagccatgga

SEQ ID NO: 5268 - RNA, 141 nt, synthetic construct
  source 1..141: mol_type = other RNA; note = pegRNA
gtgtaacctccatggctcaggttttagagctagaaatagcaagttaaaataaggctagtccgttatcaacttgaaaaagtggcaccgagtcggtgcactgcccagagtgaggattgcagaatttgttgactgagccatgga

SEQ ID NO: 5269 - RNA, 141 nt, synthetic construct
  source 1..141: mol_type = other RNA; note = pegRNA
gtgtaacctccatggctcaggttttagagctagaaatagcaagttaaaataaggctagtccgttatcaacttgaaaaagtggcaccgagtcggtgcactgcccagagtgaggattgcagaatttgtttactgagccatgga

SEQ ID NO: 5270 - RNA, 141 nt, synthetic construct
  source 1..141: mol_type = other RNA; note = pegRNA
gtgtaacctccatggctcaggttttagagctagaaatagcaagttaaaataaggctagtccgttatcaacttgaaaaagtggcaccgagtcggtgcagagtgaggattgcagaatttgttaactgagccatggaggttaca

SEQ ID NO: 5271 - RNA, 141 nt, synthetic construct
  source 1..141: mol_type = other RNA; note = pegRNA
gtgtaacctccatggctcaggttttagagctagaaatagcaagttaaaataaggctagtccgttatcaacttgaaaaagtggcaccgagtcggtgcagagtgaggattgcagaatttgttaactgagccatggaggttttt

SEQ ID NO: 5272 - RNA, 141 nt, synthetic construct
  source 1..141: mol_type = other RNA; note = pegRNA
gtgtaacctccatggctcaggttttagagctagaaatagcaagttaaaataaggctagtccgttatcaacttgaaaaagtggcaccgagtcggtgcagagtgaggattgcagaatttgttgactgagccatggaggttaca

SEQ ID NO: 5273 - RNA, 141 nt, synthetic construct
  source 1..141: mol_type = other RNA; note = pegRNA
gtgtaacctccatggctcaggttttagagctagaaatagcaagttaaaataaggctagtccgttatcaacttgaaaaagtggcaccgagtcggtgcagagtgaggattgcagaatttgttgactgagccatggaggttttt

SEQ ID NO: 5274 - RNA, 141 nt, synthetic construct
  source 1..141: mol_type = other RNA; note = pegRNA
gtgtaacctccatggctcaggttttagagctagaaatagcaagttaaaataaggctagtccgttatcaacttgaaaaagtggcaccgagtcggtgcagagtgaggattgcagaatttgtttactgagccatggaggttaca

SEQ ID NO: 5275 - RNA, 141 nt, synthetic construct
  source 1..141: mol_type = other RNA; note = pegRNA
gtgtaacctccatggctcaggttttagagctagaaatagcaagttaaaataaggctagtccgttatcaacttgaaaaagtggcaccgagtcggtgcagagtgaggattgcagaatttgtttactgagccatggaggttttt

SEQ ID NO: 5276 - RNA, 141 nt, synthetic construct
  source 1..141: mol_type = other RNA; note = pegRNA
gtgtaacctccatggctcaggttttagagctagaaatagcaagttaaaataaggctagtccgttatcaacttgaaaaagtggcaccgagtcggtgcagtgaggattgcagaatttgttaactgagccatggaggttatttt

SEQ ID NO: 5277 - RNA, 141 nt, synthetic construct
  source 1..141: mol_type = other RNA; note = pegRNA
gtgtaacctccatggctcaggttttagagctagaaatagcaagttaaaataaggctagtccgttatcaacttgaaaaagtggcaccgagtcggtgcagtgaggattgcagaatttgttgactgagccatggaggttatttt

SEQ ID NO: 5278 - RNA, 141 nt, synthetic construct
  source 1..141: mol_type = other RNA; note = pegRNA
gtgtaacctccatggctcaggttttagagctagaaatagcaagttaaaataaggctagtccgttatcaacttgaaaaagtggcaccgagtcggtgcagtgaggattgcagaatttgtttactgagccatggaggttatttt

SEQ ID NO: 5279 - RNA, 141 nt, synthetic construct
  source 1..141: mol_type = other RNA; note = pegRNA
gtgtaacctccatggctcaggttttagagctagaaatagcaagttaaaataaggctagtccgttatcaacttgaaaaagtggcaccgagtcggtgccactgcccagagtgaggattgcagaatttgttaactgagccatgg

SEQ ID NO: 5280 - RNA, 141 nt, synthetic construct
  source 1..141: mol_type = other RNA; note = pegRNA
gtgtaacctccatggctcaggttttagagctagaaatagcaagttaaaataaggctagtccgttatcaacttgaaaaagtggcaccgagtcggtgccactgcccagagtgaggattgcagaatttgttgactgagccatgg

SEQ ID NO: 5281 - RNA, 141 nt, synthetic construct
  source 1..141: mol_type = other RNA; note = pegRNA
gtgtaacctccatggctcaggttttagagctagaaatagcaagttaaaataaggctagtccgttatcaacttgaaaaagtggcaccgagtcggtgccactgcccagagtgaggattgcagaatttgtttactgagccatgg

SEQ ID NO: 5282 - RNA, 141 nt, synthetic construct
  source 1..141: mol_type = other RNA; note = pegRNA
gtgtaacctccatggctcaggttttagagctagaaatagcaagttaaaataaggctagtccgttatcaacttgaaaaagtggcaccgagtcggtgccagagtgaggattgcagaatttgttaactgagccatggaggttac

SEQ ID NO: 5283 - RNA, 141 nt, synthetic construct
  source 1..141: mol_type = other RNA; note = pegRNA
gtgtaacctccatggctcaggttttagagctagaaatagcaagttaaaataaggctagtccgttatcaacttgaaaaagtggcaccgagtcggtgccagagtgaggattgcagaatttgttaactgagccatggaggtttt

SEQ ID NO: 5284 - RNA, 141 nt, synthetic construct
  source 1..141: mol_type = other RNA; note = pegRNA
gtgtaacctccatggctcaggttttagagctagaaatagcaagttaaaataaggctagtccgttatcaacttgaaaaagtggcaccgagtcggtgccagagtgaggattgcagaatttgttgactgagccatggaggttac

SEQ ID NO: 5285 - RNA, 141 nt, synthetic construct
  source 1..141: mol_type = other RNA; note = pegRNA
gtgtaacctccatggctcaggttttagagctagaaatagcaagttaaaataaggctagtccgttatcaacttgaaaaagtggcaccgagtcggtgccagagtgaggattgcagaatttgttgactgagccatggaggtttt

SEQ ID NO: 5286 - RNA, 141 nt, synthetic construct
  source 1..141: mol_type = other RNA; note = pegRNA
gtgtaacctccatggctcaggttttagagctagaaatagcaagttaaaataaggctagtccgttatcaacttgaaaaagtggcaccgagtcggtgccagagtgaggattgcagaatttgtttactgagccatggaggttac

SEQ ID NO: 5287 - RNA, 141 nt, synthetic construct
  source 1..141: mol_type = other RNA; note = pegRNA
gtgtaacctccatggctcaggttttagagctagaaatagcaagttaaaataaggctagtccgttatcaacttgaaaaagtggcaccgagtcggtgccagagtgaggattgcagaatttgtttactgagccatggaggtttt

SEQ ID NO: 5288 - RNA, 141 nt, synthetic construct
  source 1..141: mol_type = other RNA; note = pegRNA
gtgtaacctccatggctcaggttttagagctagaaatagcaagttaaaataaggctagtccgttatcaacttgaaaaagtggcaccgagtcggtgcccagagtgaggattgcagaatttgttaactgagccatggaggtta

SEQ ID NO: 5289 - RNA, 141 nt, synthetic construct
  source 1..141: mol_type = other RNA; note = pegRNA
gtgtaacctccatggctcaggttttagagctagaaatagcaagttaaaataaggctagtccgttatcaacttgaaaaagtggcaccgagtcggtgcccagagtgaggattgcagaatttgttaactgagccatggagtttt

SEQ ID NO: 5290 - RNA, 141 nt, synthetic construct
  source 1..141: mol_type = other RNA; note = pegRNA
gtgtaacctccatggctcaggttttagagctagaaatagcaagttaaaataaggctagtccgttatcaacttgaaaaagtggcaccgagtcggtgcccagagtgaggattgcagaatttgttgactgagccatggaggtta

SEQ ID NO: 5291 - RNA, 141 nt, synthetic construct
  source 1..141: mol_type = other RNA; note = pegRNA
gtgtaacctccatggctcaggttttagagctagaaatagcaagttaaaataaggctagtccgttatcaacttgaaaaagtggcaccgagtcggtgcccagagtgaggattgcagaatttgttgactgagccatggagtttt

SEQ ID NO: 5292 - RNA, 141 nt, synthetic construct
  source 1..141: mol_type = other RNA; note = pegRNA
gtgtaacctccatggctcaggttttagagctagaaatagcaagttaaaataaggctagtccgttatcaacttgaaaaagtggcaccgagtcggtgcccagagtgaggattgcagaatttgtttactgagccatggaggtta

SEQ ID NO: 5293 - RNA, 141 nt, synthetic construct
  source 1..141: mol_type = other RNA; note = pegRNA
gtgtaacctccatggctcaggttttagagctagaaatagcaagttaaaataaggctagtccgttatcaacttgaaaaagtggcaccgagtcggtgcccagagtgaggattgcagaatttgtttactgagccatggagtttt

SEQ ID NO: 5294 - RNA, 141 nt, synthetic construct
  source 1..141: mol_type = other RNA; note = pegRNA
gtgtaacctccatggctcaggttttagagctagaaatagcaagttaaaataaggctagtccgttatcaacttgaaaaagtggcaccgagtcggtgccccagagtgaggattgcagaatttgttaactgagccatggaggtt

SEQ ID NO: 5295 - RNA, 141 nt, synthetic construct
  source 1..141: mol_type = other RNA; note = pegRNA
gtgtaacctccatggctcaggttttagagctagaaatagcaagttaaaataaggctagtccgttatcaacttgaaaaagtggcaccgagtcggtgccccagagtgaggattgcagaatttgttaactgagccatggatttt

SEQ ID NO: 5296 - RNA, 141 nt, synthetic construct
  source 1..141: mol_type = other RNA; note = pegRNA
gtgtaacctccatggctcaggttttagagctagaaatagcaagttaaaataaggctagtccgttatcaacttgaaaaagtggcaccgagtcggtgccccagagtgaggattgcagaatttgttgactgagccatggaggtt

SEQ ID NO: 5297 - RNA, 141 nt, synthetic construct
  source 1..141: mol_type = other RNA; note = pegRNA
gtgtaacctccatggctcaggttttagagctagaaatagcaagttaaaataaggctagtccgttatcaacttgaaaaagtggcaccgagtcggtgccccagagtgaggattgcagaatttgttgactgagccatggatttt

SEQ ID NO: 5298 - RNA, 141 nt, synthetic construct
  source 1..141: mol_type = other RNA; note = pegRNA
gtgtaacctccatggctcaggttttagagctagaaatagcaagttaaaataaggctagtccgttatcaacttgaaaaagtggcaccgagtcggtgccccagagtgaggattgcagaatttgtttactgagccatggaggtt

SEQ ID NO: 5299 - RNA, 141 nt, synthetic construct
  source 1..141: mol_type = other RNA; note = pegRNA
gtgtaacctccatggctcaggttttagagctagaaatagcaagttaaaataaggctagtccgttatcaacttgaaaaagtggcaccgagtcggtgccccagagtgaggattgcagaatttgtttactgagccatggatttt

SEQ ID NO: 5300 - RNA, 141 nt, synthetic construct
  source 1..141: mol_type = other RNA; note = pegRNA
gtgtaacctccatggctcaggttttagagctagaaatagcaagttaaaataaggctagtccgttatcaacttgaaaaagtggcaccgagtcggtgcctgcccagagtgaggattgcagaatttgttaactgagccatggag

SEQ ID NO: 5301 - RNA, 141 nt, synthetic construct
  source 1..141: mol_type = other RNA; note = pegRNA
gtgtaacctccatggctcaggttttagagctagaaatagcaagttaaaataaggctagtccgttatcaacttgaaaaagtggcaccgagtcggtgcctgcccagagtgaggattgcagaatttgttgactgagccatggag

SEQ ID NO: 5302 - RNA, 141 nt, synthetic construct
  source 1..141: mol_type = other RNA; note = pegRNA
gtgtaacctccatggctcaggttttagagctagaaatagcaagttaaaataaggctagtccgttatcaacttgaaaaagtggcaccgagtcggtgcctgcccagagtgaggattgcagaatttgtttactgagccatggag

SEQ ID NO: 5303 - RNA, 141 nt, synthetic construct
  source 1..141: mol_type = other RNA; note = pegRNA
gtgtaacctccatggctcaggttttagagctagaaatagcaagttaaaataaggctagtccgttatcaacttgaaaaagtggcaccgagtcggtgcgagtgaggattgcagaatttgttaactgagccatggaggtttttt

SEQ ID NO: 5304 - RNA, 141 nt, synthetic construct
  source 1..141: mol_type = other RNA; note = pegRNA
gtgtaacctccatggctcaggttttagagctagaaatagcaagttaaaataaggctagtccgttatcaacttgaaaaagtggcaccgagtcggtgcgagtgaggattgcagaatttgttgactgagccatggaggtttttt

SEQ ID NO: 5305 - RNA, 141 nt, synthetic construct
  source 1..141: mol_type = other RNA; note = pegRNA
gtgtaacctccatggctcaggttttagagctagaaatagcaagttaaaataaggctagtccgttatcaacttgaaaaagtggcaccgagtcggtgcgagtgaggattgcagaatttgtttactgagccatggaggtttttt

SEQ ID NO: 5306 - RNA, 141 nt, synthetic construct
  source 1..141: mol_type = other RNA; note = pegRNA
gtgtaacctccatggctcaggttttagagctagaaatagcaagttaaaataaggctagtccgttatcaacttgaaaaagtggcaccgagtcggtgcgcccagagtgaggattgcagaatttgttaactgagccatggaggt

SEQ ID NO: 5307 - RNA, 141 nt, synthetic construct
  source 1..141: mol_type = other RNA; note = pegRNA
gtgtaacctccatggctcaggttttagagctagaaatagcaagttaaaataaggctagtccgttatcaacttgaaaaagtggcaccgagtcggtgcgcccagagtgaggattgcagaatttgttaactgagccatggtttt

SEQ ID NO: 5308 - RNA, 141 nt, synthetic construct
  source 1..141: mol_type = other RNA; note = pegRNA
gtgtaacctccatggctcaggttttagagctagaaatagcaagttaaaataaggctagtccgttatcaacttgaaaaagtggcaccgagtcggtgcgcccagagtgaggattgcagaatttgttgactgagccatggaggt

SEQ ID NO: 5309 - RNA, 141 nt, synthetic construct
  source 1..141: mol_type = other RNA; note = pegRNA
gtgtaacctccatggctcaggttttagagctagaaatagcaagttaaaataaggctagtccgttatcaacttgaaaaagtggcaccgagtcggtgcgcccagagtgaggattgcagaatttgttgactgagccatggtttt

SEQ ID NO: 5310 - RNA, 141 nt, synthetic construct
  source 1..141: mol_type = other RNA; note = pegRNA
gtgtaacctccatggctcaggttttagagctagaaatagcaagttaaaataaggctagtccgttatcaacttgaaaaagtggcaccgagtcggtgcgcccagagtgaggattgcagaatttgtttactgagccatggaggt

SEQ ID NO: 5311 - RNA, 141 nt, synthetic construct
  source 1..141: mol_type = other RNA; note = pegRNA
gtgtaacctccatggctcaggttttagagctagaaatagcaagttaaaataaggctagtccgttatcaacttgaaaaagtggcaccgagtcggtgcgcccagagtgaggattgcagaatttgtttactgagccatggtttt

SEQ ID NO: 5312 - RNA, 141 nt, synthetic construct
  source 1..141: mol_type = other RNA; note = pegRNA
gtgtaacctccatggctcaggttttagagctagaaatagcaagttaaaataaggctagtccgttatcaacttgaaaaagtggcaccgagtcggtgcgtgaggattgcagaatttgttaactgagccatggaggttactttt

SEQ ID NO: 5313 - RNA, 141 nt, synthetic construct
  source 1..141: mol_type = other RNA; note = pegRNA
gtgtaacctccatggctcaggttttagagctagaaatagcaagttaaaataaggctagtccgttatcaacttgaaaaagtggcaccgagtcggtgcgtgaggattgcagaatttgttgactgagccatggaggttactttt

SEQ ID NO: 5314 - RNA, 141 nt, synthetic construct
  source 1..141: mol_type = other RNA; note = pegRNA
gtgtaacctccatggctcaggttttagagctagaaatagcaagttaaaataaggctagtccgttatcaacttgaaaaagtggcaccgagtcggtgcgtgaggattgcagaatttgtttactgagccatggaggttactttt

SEQ ID NO: 5315 - RNA, 141 nt, synthetic construct
  source 1..141: mol_type = other RNA; note = pegRNA
gtgtaacctccatggctcaggttttagagctagaaatagcaagttaaaataaggctagtccgttatcaacttgaaaaagtggcaccgagtcggtgctgaggattgcagaatttgttaactgagccatggaggttacatttt

SEQ ID NO: 5316 - RNA, 141 nt, synthetic construct
  source 1..141: mol_type = other RNA; note = pegRNA
gtgtaacctccatggctcaggttttagagctagaaatagcaagttaaaataaggctagtccgttatcaacttgaaaaagtggcaccgagtcggtgctgaggattgcagaatttgttgactgagccatggaggttacatttt

SEQ ID NO: 5317 - RNA, 141 nt, synthetic construct
  source 1..141: mol_type = other RNA; note = pegRNA
gtgtaacctccatggctcaggttttagagctagaaatagcaagttaaaataaggctagtccgttatcaacttgaaaaagtggcaccgagtcggtgctgaggattgcagaatttgtttactgagccatggaggttacatttt

SEQ ID NO: 5318 - RNA, 141 nt, synthetic construct
  source 1..141: mol_type = other RNA; note = pegRNA
gtgtaacctccatggctcaggttttagagctagaaatagcaagttaaaataaggctagtccgttatcaacttgaaaaagtggcaccgagtcggtgctgcccagagtgaggattgcagaatttgttaactgagccatggagg

SEQ ID NO: 5319 - RNA, 141 nt, synthetic construct
  source 1..141: mol_type = other RNA; note = pegRNA
gtgtaacctccatggctcaggttttagagctagaaatagcaagttaaaataaggctagtccgttatcaacttgaaaaagtggcaccgagtcggtgctgcccagagtgaggattgcagaatttgttgactgagccatggagg

SEQ ID NO: 5320 - RNA, 141 nt, synthetic construct
  source 1..141: mol_type = other RNA; note = pegRNA
gtgtaacctccatggctcaggttttagagctagaaatagcaagttaaaataaggctagtccgttatcaacttgaaaaagtggcaccgagtcggtgctgcccagagtgaggattgcagaatttgtttactgagccatggagg

SEQ ID NO: 5321 - RNA, 142 nt, synthetic construct
  source 1..142: mol_type = other RNA; note = pegRNA
gtgtaacctccatggctcaggttttagagctagaaatagcaagttaaaataaggctagtccgttatcaacttgaaaaagtggcaccgagtcggtgcacactgcccagagtgaggattgcagaatttgttaactgagccatgg

SEQ ID NO: 5322 - RNA, 142 nt, synthetic construct
  source 1..142: mol_type = other RNA; note = pegRNA
gtgtaacctccatggctcaggttttagagctagaaatagcaagttaaaataaggctagtccgttatcaacttgaaaaagtggcaccgagtcggtgcacactgcccagagtgaggattgcagaatttgttgactgagccatgg

SEQ ID NO: 5323 - RNA, 142 nt, synthetic construct
  source 1..142: mol_type = other RNA; note = pegRNA
gtgtaacctccatggctcaggttttagagctagaaatagcaagttaaaataaggctagtccgttatcaacttgaaaaagtggcaccgagtcggtgcacactgcccagagtgaggattgcagaatttgtttactgagccatgg

SEQ ID NO: 5324 - RNA, 142 nt, synthetic construct
  source 1..142: mol_type = other RNA; note = pegRNA
gtgtaacctccatggctcaggttttagagctagaaatagcaagttaaaataaggctagtccgttatcaacttgaaaaagtggcaccgagtcggtgcactgcccagagtgaggattgcagaatttgttaactgagccatggag

SEQ ID NO: 5325 - RNA, 142 nt, synthetic construct
  source 1..142: mol_type = other RNA; note = pegRNA
gtgtaacctccatggctcaggttttagagctagaaatagcaagttaaaataaggctagtccgttatcaacttgaaaaagtggcaccgagtcggtgcactgcccagagtgaggattgcagaatttgttgactgagccatggag

SEQ ID NO: 5326 - RNA, 142 nt, synthetic construct
  source 1..142: mol_type = other RNA; note = pegRNA
gtgtaacctccatggctcaggttttagagctagaaatagcaagttaaaataaggctagtccgttatcaacttgaaaaagtggcaccgagtcggtgcactgcccagagtgaggattgcagaatttgtttactgagccatggag

SEQ ID NO: 5327 - RNA, 142 nt, synthetic construct
  source 1..142: mol_type = other RNA; note = pegRNA
gtgtaacctccatggctcaggttttagagctagaaatagcaagttaaaataaggctagtccgttatcaacttgaaaaagtggcaccgagtcggtgcagagtgaggattgcagaatttgttaactgagccatggaggtttttt

SEQ ID NO: 5328 - RNA, 142 nt, synthetic construct
  source 1..142: mol_type = other RNA; note = pegRNA
gtgtaacctccatggctcaggttttagagctagaaatagcaagttaaaataaggctagtccgttatcaacttgaaaaagtggcaccgagtcggtgcagagtgaggattgcagaatttgttgactgagccatggaggtttttt

SEQ ID NO: 5329 - RNA, 142 nt, synthetic construct
  source 1..142: mol_type = other RNA; note = pegRNA
gtgtaacctccatggctcaggttttagagctagaaatagcaagttaaaataaggctagtccgttatcaacttgaaaaagtggcaccgagtcggtgcagagtgaggattgcagaatttgtttactgagccatggaggtttttt

SEQ ID NO: 5330 - RNA, 142 nt, synthetic construct
  source 1..142: mol_type = other RNA; note = pegRNA
gtgtaacctccatggctcaggttttagagctagaaatagcaagttaaaataaggctagtccgttatcaacttgaaaaagtggcaccgagtcggtgcagtgaggattgcagaatttgttaactgagccatggaggttactttt

SEQ ID NO: 5331 - RNA, 142 nt, synthetic construct
  source 1..142: mol_type = other RNA; note = pegRNA
gtgtaacctccatggctcaggttttagagctagaaatagcaagttaaaataaggctagtccgttatcaacttgaaaaagtggcaccgagtcggtgcagtgaggattgcagaatttgttgactgagccatggaggttactttt

SEQ ID NO: 5332 - RNA, 142 nt, synthetic construct
  source 1..142: mol_type = other RNA; note = pegRNA
gtgtaacctccatggctcaggttttagagctagaaatagcaagttaaaataaggctagtccgttatcaacttgaaaaagtggcaccgagtcggtgcagtgaggattgcagaatttgtttactgagccatggaggttactttt

SEQ ID NO: 5333 - RNA, 142 nt, synthetic construct
  source 1..142: mol_type = other RNA; note = pegRNA
gtgtaacctccatggctcaggttttagagctagaaatagcaagttaaaataaggctagtccgttatcaacttgaaaaagtggcaccgagtcggtgccactgcccagagtgaggattgcagaatttgttaactgagccatgga

SEQ ID NO: 5334 - RNA, 142 nt, synthetic construct
  source 1..142: mol_type = other RNA; note = pegRNA
gtgtaacctccatggctcaggttttagagctagaaatagcaagttaaaataaggctagtccgttatcaacttgaaaaagtggcaccgagtcggtgccactgcccagagtgaggattgcagaatttgttgactgagccatgga

SEQ ID NO: 5335 - RNA, 142 nt, synthetic construct
  source 1..142: mol_type = other RNA; note = pegRNA
gtgtaacctccatggctcaggttttagagctagaaatagcaagttaaaataaggctagtccgttatcaacttgaaaaagtggcaccgagtcggtgccactgcccagagtgaggattgcagaatttgtttactgagccatgga

SEQ ID NO: 5336 - RNA, 142 nt, synthetic construct
  source 1..142: mol_type = other RNA; note = pegRNA
gtgtaacctccatggctcaggttttagagctagaaatagcaagttaaaataaggctagtccgttatcaacttgaaaaagtggcaccgagtcggtgccagagtgaggattgcagaatttgttaactgagccatggaggttaca

SEQ ID NO: 5337 - RNA, 142 nt, synthetic construct
  source 1..142: mol_type = other RNA; note = pegRNA
gtgtaacctccatggctcaggttttagagctagaaatagcaagttaaaataaggctagtccgttatcaacttgaaaaagtggcaccgagtcggtgccagagtgaggattgcagaatttgttaactgagccatggaggttttt

SEQ ID NO: 5338 - RNA, 142 nt, synthetic construct
  source 1..142: mol_type = other RNA; note = pegRNA
gtgtaacctccatggctcaggttttagagctagaaatagcaagttaaaataaggctagtccgttatcaacttgaaaaagtggcaccgagtcggtgccagagtgaggattgcagaatttgttgactgagccatggaggttaca

SEQ ID NO: 5339 - RNA, 142 nt, synthetic construct
  source 1..142: mol_type = other RNA; note = pegRNA
gtgtaacctccatggctcaggttttagagctagaaatagcaagttaaaataaggctagtccgttatcaacttgaaaaagtggcaccgagtcggtgccagagtgaggattgcagaatttgttgactgagccatggaggttttt

SEQ ID NO: 5340 - RNA, 142 nt, synthetic construct
  source 1..142: mol_type = other RNA; note = pegRNA
gtgtaacctccatggctcaggttttagagctagaaatagcaagttaaaataaggctagtccgttatcaacttgaaaaagtggcaccgagtcggtgccagagtgaggattgcagaatttgtttactgagccatggaggttaca

SEQ ID NO: 5341 - RNA, 142 nt, synthetic construct
  source 1..142: mol_type = other RNA; note = pegRNA
gtgtaacctccatggctcaggttttagagctagaaatagcaagttaaaataaggctagtccgttatcaacttgaaaaagtggcaccgagtcggtgccagagtgaggattgcagaatttgtttactgagccatggaggttttt

SEQ ID NO: 5342 - RNA, 142 nt, synthetic construct
  source 1..142: mol_type = other RNA; note = pegRNA
gtgtaacctccatggctcaggttttagagctagaaatagcaagttaaaataaggctagtccgttatcaacttgaaaaagtggcaccgagtcggtgcccagagtgaggattgcagaatttgttaactgagccatggaggttac

SEQ ID NO: 5343 - RNA, 142 nt, synthetic construct
  source 1..142: mol_type = other RNA; note = pegRNA
gtgtaacctccatggctcaggttttagagctagaaatagcaagttaaaataaggctagtccgttatcaacttgaaaaagtggcaccgagtcggtgcccagagtgaggattgcagaatttgttaactgagccatggaggtttt

SEQ ID NO: 5344 - RNA, 142 nt, synthetic construct
  source 1..142: mol_type = other RNA; note = pegRNA
gtgtaacctccatggctcaggttttagagctagaaatagcaagttaaaataaggctagtccgttatcaacttgaaaaagtggcaccgagtcggtgcccagagtgaggattgcagaatttgttgactgagccatggaggttac

SEQ ID NO: 5345 - RNA, 142 nt, synthetic construct
  source 1..142: mol_type = other RNA; note = pegRNA
gtgtaacctccatggctcaggttttagagctagaaatagcaagttaaaataaggctagtccgttatcaacttgaaaaagtggcaccgagtcggtgcccagagtgaggattgcagaatttgttgactgagccatggaggtttt

SEQ ID NO: 5346 - RNA, 142 nt, synthetic construct
  source 1..142: mol_type = other RNA; note = pegRNA
gtgtaacctccatggctcaggttttagagctagaaatagcaagttaaaataaggctagtccgttatcaacttgaaaaagtggcaccgagtcggtgcccagagtgaggattgcagaatttgtttactgagccatggaggttac

SEQ ID NO: 5347 - RNA, 142 nt, synthetic construct
  source 1..142: mol_type = other RNA; note = pegRNA
gtgtaacctccatggctcaggttttagagctagaaatagcaagttaaaataaggctagtccgttatcaacttgaaaaagtggcaccgagtcggtgcccagagtgaggattgcagaatttgtttactgagccatggaggtttt

SEQ ID NO: 5348 - RNA, 142 nt, synthetic construct
  source 1..142: mol_type = other RNA; note = pegRNA
gtgtaacctccatggctcaggttttagagctagaaatagcaagttaaaataaggctagtccgttatcaacttgaaaaagtggcaccgagtcggtgccccagagtgaggattgcagaatttgttaactgagccatggaggtta

SEQ ID NO: 5349 - RNA, 142 nt, synthetic construct
  source 1..142: mol_type = other RNA; note = pegRNA
gtgtaacctccatggctcaggttttagagctagaaatagcaagttaaaataaggctagtccgttatcaacttgaaaaagtggcaccgagtcggtgccccagagtgaggattgcagaatttgttaactgagccatggagtttt

SEQ ID NO: 5350 - RNA, 142 nt, synthetic construct
  source 1..142: mol_type = other RNA; note = pegRNA
gtgtaacctccatggctcaggttttagagctagaaatagcaagttaaaataaggctagtccgttatcaacttgaaaaagtggcaccgagtcggtgccccagagtgaggattgcagaatttgttgactgagccatggaggtta

SEQ ID NO: 5351 - RNA, 142 nt, synthetic construct
  source 1..142: mol_type = other RNA; note = pegRNA
gtgtaacctccatggctcaggttttagagctagaaatagcaagttaaaataaggctagtccgttatcaacttgaaaaagtggcaccgagtcggtgccccagagtgaggattgcagaatttgttgactgagccatggagtttt

SEQ ID NO: 5352 - RNA, 142 nt, synthetic construct
  source 1..142: mol_type = other RNA; note = pegRNA
gtgtaacctccatggctcaggttttagagctagaaatagcaagttaaaataaggctagtccgttatcaacttgaaaaagtggcaccgagtcggtgccccagagtgaggattgcagaatttgtttactgagccatggaggtta

SEQ ID NO: 5353 - RNA, 142 nt, synthetic construct
  source 1..142: mol_type = other RNA; note = pegRNA
gtgtaacctccatggctcaggttttagagctagaaatagcaagttaaaataaggctagtccgttatcaacttgaaaaagtggcaccgagtcggtgccccagagtgaggattgcagaatttgtttactgagccatggagtttt

SEQ ID NO: 5354 - RNA, 142 nt, synthetic construct
  source 1..142: mol_type = other RNA; note = pegRNA
gtgtaacctccatggctcaggttttagagctagaaatagcaagttaaaataaggctagtccgttatcaacttgaaaaagtggcaccgagtcggtgcctgcccagagtgaggattgcagaatttgttaactgagccatggagg

SEQ ID NO: 5355 - RNA, 142 nt, synthetic construct
  source 1..142: mol_type = other RNA; note = pegRNA
gtgtaacctccatggctcaggttttagagctagaaatagcaagttaaaataaggctagtccgttatcaacttgaaaaagtggcaccgagtcggtgcctgcccagagtgaggattgcagaatttgttgactgagccatggagg

SEQ ID NO: 5356 - RNA, 142 nt, synthetic construct
  source 1..142: mol_type = other RNA; note = pegRNA
gtgtaacctccatggctcaggttttagagctagaaatagcaagttaaaataaggctagtccgttatcaacttgaaaaagtggcaccgagtcggtgcctgcccagagtgaggattgcagaatttgtttactgagccatggagg

SEQ ID NO: 5357 - RNA, 142 nt, synthetic construct
  source 1..142: mol_type = other RNA; note = pegRNA
gtgtaacctccatggctcaggttttagagctagaaatagcaagttaaaataaggctagtccgttatcaacttgaaaaagtggcaccgagtcggtgcgagtgaggattgcagaatttgttaactgagccatggaggttatttt

SEQ ID NO: 5358 - RNA, 142 nt, synthetic construct
  source 1..142: mol_type = other RNA; note = pegRNA
gtgtaacctccatggctcaggttttagagctagaaatagcaagttaaaataaggctagtccgttatcaacttgaaaaagtggcaccgagtcggtgcgagtgaggattgcagaatttgttgactgagccatggaggttatttt

SEQ ID NO: 5359 - RNA, 142 nt, synthetic construct
  source 1..142: mol_type = other RNA; note = pegRNA
gtgtaacctccatggctcaggttttagagctagaaatagcaagttaaaataaggctagtccgttatcaacttgaaaaagtggcaccgagtcggtgcgagtgaggattgcagaatttgtttactgagccatggaggttatttt

SEQ ID NO: 5360 - RNA, 142 nt, synthetic construct
  source 1..142: mol_type = other RNA; note = pegRNA
gtgtaacctccatggctcaggttttagagctagaaatagcaagttaaaataaggctagtccgttatcaacttgaaaaagtggcaccgagtcggtgcgcccagagtgaggattgcagaatttgttaactgagccatggaggtt

SEQ ID NO: 5361 - RNA, 142 nt, synthetic construct
  source 1..142: mol_type = other RNA; note = pegRNA
gtgtaacctccatggctcaggttttagagctagaaatagcaagttaaaataaggctagtccgttatcaacttgaaaaagtggcaccgagtcggtgcgcccagagtgaggattgcagaatttgttaactgagccatggatttt

SEQ ID NO: 5362 - RNA, 142 nt, synthetic construct
  source 1..142: mol_type = other RNA; note = pegRNA
gtgtaacctccatggctcaggttttagagctagaaatagcaagttaaaataaggctagtccgttatcaacttgaaaaagtggcaccgagtcggtgcgcccagagtgaggattgcagaatttgttgactgagccatggaggtt

SEQ ID NO: 5363 - RNA, 142 nt, synthetic construct
  source 1..142: mol_type = other RNA; note = pegRNA
gtgtaacctccatggctcaggttttagagctagaaatagcaagttaaaataaggctagtccgttatcaacttgaaaaagtggcaccgagtcggtgcgcccagagtgaggattgcagaatttgttgactgagccatggatttt

SEQ ID NO: 5364 - RNA, 142 nt, synthetic construct
  source 1..142: mol_type = other RNA; note = pegRNA
gtgtaacctccatggctcaggttttagagctagaaatagcaagttaaaataaggctagtccgttatcaacttgaaaaagtggcaccgagtcggtgcgcccagagtgaggattgcagaatttgtttactgagccatggaggtt

SEQ ID NO: 5365 - RNA, 142 nt, synthetic construct
  source 1..142: mol_type = other RNA; note = pegRNA
gtgtaacctccatggctcaggttttagagctagaaatagcaagttaaaataaggctagtccgttatcaacttgaaaaagtggcaccgagtcggtgcgcccagagtgaggattgcagaatttgtttactgagccatggatttt

SEQ ID NO: 5366 - RNA, 142 nt, synthetic construct
  source 1..142: mol_type = other RNA; note = pegRNA
gtgtaacctccatggctcaggttttagagctagaaatagcaagttaaaataaggctagtccgttatcaacttgaaaaagtggcaccgagtcggtgcgtgaggattgcagaatttgttaactgagccatggaggttacatttt

SEQ ID NO: 5367 - RNA, 142 nt, synthetic construct
  source 1..142: mol_type = other RNA; note = pegRNA
gtgtaacctccatggctcaggttttagagctagaaatagcaagttaaaataaggctagtccgttatcaacttgaaaaagtggcaccgagtcggtgcgtgaggattgcagaatttgttgactgagccatggaggttacatttt

SEQ ID NO: 5368 - RNA, 142 nt, synthetic construct
  source 1..142: mol_type = other RNA; note = pegRNA
gtgtaacctccatggctcaggttttagagctagaaatagcaagttaaaataaggctagtccgttatcaacttgaaaaagtggcaccgagtcggtgcgtgaggattgcagaatttgtttactgagccatggaggttacatttt

SEQ ID NO: 5369 - RNA, 142 nt, synthetic construct
  source 1..142: mol_type = other RNA; note = pegRNA
gtgtaacctccatggctcaggttttagagctagaaatagcaagttaaaataaggctagtccgttatcaacttgaaaaagtggcaccgagtcggtgctgcccagagtgaggattgcagaatttgttaactgagccatggaggt

SEQ ID NO: 5370 - RNA, 142 nt, synthetic construct
  source 1..142: mol_type = other RNA; note = pegRNA
gtgtaacctccatggctcaggttttagagctagaaatagcaagttaaaataaggctagtccgttatcaacttgaaaaagtggcaccgagtcggtgctgcccagagtgaggattgcagaatttgttaactgagccatggtttt

SEQ ID NO: 5371 - RNA, 142 nt, synthetic construct
  source 1..142: mol_type = other RNA; note = pegRNA
gtgtaacctccatggctcaggttttagagctagaaatagcaagttaaaataaggctagtccgttatcaacttgaaaaagtggcaccgagtcggtgctgcccagagtgaggattgcagaatttgttgactgagccatggaggt

SEQ ID NO: 5372 - RNA, 142 nt, synthetic construct
  source 1..142: mol_type = other RNA; note = pegRNA
gtgtaacctccatggctcaggttttagagctagaaatagcaagttaaaataaggctagtccgttatcaacttgaaaaagtggcaccgagtcggtgctgcccagagtgaggattgcagaatttgttgactgagccatggtttt

SEQ ID NO: 5373 - RNA, 142 nt, synthetic construct
  source 1..142: mol_type = other RNA; note = pegRNA
gtgtaacctccatggctcaggttttagagctagaaatagcaagttaaaataaggctagtccgttatcaacttgaaaaagtggcaccgagtcggtgctgcccagagtgaggattgcagaatttgtttactgagccatggaggt

SEQ ID NO: 5374 - RNA, 142 nt, synthetic construct
  source 1..142: mol_type = other RNA; note = pegRNA
gtgtaacctccatggctcaggttttagagctagaaatagcaagttaaaataaggctagtccgttatcaacttgaaaaagtggcaccgagtcggtgctgcccagagtgaggattgcagaatttgtttactgagccatggtttt

SEQ ID NO: 5375 - RNA, 143 nt, synthetic construct
  source 1..143: mol_type = other RNA; note = pegRNA
gtgtaacctccatggctcaggttttagagctagaaatagcaagttaaaataaggctagtccgttatcaacttgaaaaagtggcaccgagtcggtgcacactgcccagagtgaggattgcagaatttgttaactgagccatgga

SEQ ID NO: 5376 - RNA, 143 nt, synthetic construct
  source 1..143: mol_type = other RNA; note = pegRNA
gtgtaacctccatggctcaggttttagagctagaaatagcaagttaaaataaggctagtccgttatcaacttgaaaaagtggcaccgagtcggtgcacactgcccagagtgaggattgcagaatttgttgactgagccatgga

SEQ ID NO: 5377 - RNA, 143 nt, synthetic construct
  source 1..143: mol_type = other RNA; note = pegRNA
gtgtaacctccatggctcaggttttagagctagaaatagcaagttaaaataaggctagtccgttatcaacttgaaaaagtggcaccgagtcggtgcacactgcccagagtgaggattgcagaatttgtttactgagccatgga

SEQ ID NO: 5378 - RNA, 143 nt, synthetic construct
  source 1..143: mol_type = other RNA; note = pegRNA
gtgtaacctccatggctcaggttttagagctagaaatagcaagttaaaataaggctagtccgttatcaacttgaaaaagtggcaccgagtcggtgcactgcccagagtgaggattgcagaatttgttaactgagccatggagg

SEQ ID NO: 5379 - RNA, 143 nt, synthetic construct
  source 1..143: mol_type = other RNA; note = pegRNA
gtgtaacctccatggctcaggttttagagctagaaatagcaagttaaaataaggctagtccgttatcaacttgaaaaagtggcaccgagtcggtgcactgcccagagtgaggattgcagaatttgttgactgagccatggagg

SEQ ID NO: 5380 - RNA, 143 nt, synthetic construct
  source 1..143: mol_type = other RNA; note = pegRNA
gtgtaacctccatggctcaggttttagagctagaaatagcaagttaaaataaggctagtccgttatcaacttgaaaaagtggcaccgagtcggtgcactgcccagagtgaggattgcagaatttgtttactgagccatggagg

SEQ ID NO: 5381 - RNA, 143 nt, synthetic construct
  source 1..143: mol_type = other RNA; note = pegRNA
gtgtaacctccatggctcaggttttagagctagaaatagcaagttaaaataaggctagtccgttatcaacttgaaaaagtggcaccgagtcggtgcagagtgaggattgcagaatttgttaactgagccatggaggttatttt

SEQ ID NO: 5382 - RNA, 143 nt, synthetic construct
  source 1..143: mol_type = other RNA; note = pegRNA
gtgtaacctccatggctcaggttttagagctagaaatagcaagttaaaataaggctagtccgttatcaacttgaaaaagtggcaccgagtcggtgcagagtgaggattgcagaatttgttgactgagccatggaggttatttt

SEQ ID NO: 5383 - RNA, 143 nt, synthetic construct
  source 1..143: mol_type = other RNA; note = pegRNA
gtgtaacctccatggctcaggttttagagctagaaatagcaagttaaaataaggctagtccgttatcaacttgaaaaagtggcaccgagtcggtgcagagtgaggattgcagaatttgtttactgagccatggaggttatttt

SEQ ID NO: 5384 - RNA, 143 nt, synthetic construct
  source 1..143: mol_type = other RNA; note = pegRNA
gtgtaacctccatggctcaggttttagagctagaaatagcaagttaaaataaggctagtccgttatcaacttgaaaaagtggcaccgagtcggtgcagtgaggattgcagaatttgttaactgagccatggaggttacatttt

SEQ ID NO: 5385 - RNA, 143 nt, synthetic construct
  source 1..143: mol_type = other RNA; note = pegRNA
gtgtaacctccatggctcaggttttagagctagaaatagcaagttaaaataaggctagtccgttatcaacttgaaaaagtggcaccgagtcggtgcagtgaggattgcagaatttgttgactgagccatggaggttacatttt

SEQ ID NO: 5386 - RNA, 143 nt, synthetic construct
  source 1..143: mol_type = other RNA; note = pegRNA
gtgtaacctccatggctcaggttttagagctagaaatagcaagttaaaataaggctagtccgttatcaacttgaaaaagtggcaccgagtcggtgcagtgaggattgcagaatttgtttactgagccatggaggttacatttt

SEQ ID NO: 5387 - RNA, 143 nt, synthetic construct
  source 1..143: mol_type = other RNA; note = pegRNA
gtgtaacctccatggctcaggttttagagctagaaatagcaagttaaaataaggctagtccgttatcaacttgaaaaagtggcaccgagtcggtgccacactgcccagagtgaggattgcagaatttgttaactgagccatgg

SEQ ID NO: 5388 - RNA, 143 nt, synthetic construct
  source 1..143: mol_type = other RNA; note = pegRNA
gtgtaacctccatggctcaggttttagagctagaaatagcaagttaaaataaggctagtccgttatcaacttgaaaaagtggcaccgagtcggtgccacactgcccagagtgaggattgcagaatttgttgactgagccatgg

SEQ ID NO: 5389 - RNA, 143 nt, synthetic construct
  source 1..143: mol_type = other RNA; note = pegRNA
gtgtaacctccatggctcaggttttagagctagaaatagcaagttaaaataaggctagtccgttatcaacttgaaaaagtggcaccgagtcggtgccacactgcccagagtgaggattgcagaatttgtttactgagccatgg

SEQ ID NO: 5390 - RNA, 143 nt, synthetic construct
  source 1..143: mol_type = other RNA; note = pegRNA
gtgtaacctccatggctcaggttttagagctagaaatagcaagttaaaataaggctagtccgttatcaacttgaaaaagtggcaccgagtcggtgccactgcccagagtgaggattgcagaatttgttaactgagccatggag

SEQ ID NO: 5391 - RNA, 143 nt, synthetic construct
  source 1..143: mol_type = other RNA; note = pegRNA
gtgtaacctccatggctcaggttttagagctagaaatagcaagttaaaataaggctagtccgttatcaacttgaaaaagtggcaccgagtcggtgccactgcccagagtgaggattgcagaatttgttgactgagccatggag

SEQ ID NO: 5392 - RNA, 143 nt, synthetic construct
  source 1..143: mol_type = other RNA; note = pegRNA
gtgtaacctccatggctcaggttttagagctagaaatagcaagttaaaataaggctagtccgttatcaacttgaaaaagtggcaccgagtcggtgccactgcccagagtgaggattgcagaatttgtttactgagccatggag

SEQ ID NO: 5393 - RNA, 143 nt, synthetic construct
  source 1..143: mol_type = other RNA; note = pegRNA
gtgtaacctccatggctcaggttttagagctagaaatagcaagttaaaataaggctagtccgttatcaacttgaaaaagtggcaccgagtcggtgccagagtgaggattgcagaatttgttaactgagccatggaggtttttt

SEQ ID NO: 5394 - RNA, 143 nt, synthetic construct
  source 1..143: mol_type = other RNA; note = pegRNA
gtgtaacctccatggctcaggttttagagctagaaatagcaagttaaaataaggctagtccgttatcaacttgaaaaagtggcaccgagtcggtgccagagtgaggattgcagaatttgttgactgagccatggaggtttttt

SEQ ID NO: 5395 - RNA, 143 nt, synthetic construct
  source 1..143: mol_type = other RNA; note = pegRNA
gtgtaacctccatggctcaggttttagagctagaaatagcaagttaaaataaggctagtccgttatcaacttgaaaaagtggcaccgagtcggtgccagagtgaggattgcagaatttgtttactgagccatggaggtttttt

SEQ ID NO: 5396 - RNA, 143 nt, synthetic construct
  source 1..143: mol_type = other RNA; note = pegRNA
gtgtaacctccatggctcaggttttagagctagaaatagcaagttaaaataaggctagtccgttatcaacttgaaaaagtggcaccgagtcggtgcccagagtgaggattgcagaatttgttaactgagccatggaggttaca

SEQ ID NO: 5397 - RNA, 143 nt, synthetic construct
  source 1..143: mol_type = other RNA; note = pegRNA
gtgtaacctccatggctcaggttttagagctagaaatagcaagttaaaataaggctagtccgttatcaacttgaaaaagtggcaccgagtcggtgcccagagtgaggattgcagaatttgttaactgagccatggaggttttt

SEQ ID NO: 5398 - RNA, 143 nt, synthetic construct
  source 1..143: mol_type = other RNA; note = pegRNA
gtgtaacctccatggctcaggttttagagctagaaatagcaagttaaaataaggctagtccgttatcaacttgaaaaagtggcaccgagtcggtgcccagagtgaggattgcagaatttgttgactgagccatggaggttaca

SEQ ID NO: 5399 - RNA, 143 nt, synthetic construct
  source 1..143: mol_type = other RNA; note = pegRNA
gtgtaacctccatggctcaggttttagagctagaaatagcaagttaaaataaggctagtccgttatcaacttgaaaaagtggcaccgagtcggtgcccagagtgaggattgcagaatttgttgactgagccatggaggttttt

SEQ ID NO: 5400 - RNA, 143 nt, synthetic construct
  source 1..143: mol_type = other RNA; note = pegRNA
gtgtaacctccatggctcaggttttagagctagaaatagcaagttaaaataaggctagtccgttatcaacttgaaaaagtggcaccgagtcggtgcccagagtgaggattgcagaatttgtttactgagccatggaggttaca

SEQ ID NO: 5401 - RNA, 143 nt, synthetic construct
  source 1..143: mol_type = other RNA; note = pegRNA
gtgtaacctccatggctcaggttttagagctagaaatagcaagttaaaataaggctagtccgttatcaacttgaaaaagtggcaccgagtcggtgcccagagtgaggattgcagaatttgtttactgagccatggaggttttt

SEQ ID NO: 5402 - RNA, 143 nt, synthetic construct
  source 1..143: mol_type = other RNA; note = pegRNA
gtgtaacctccatggctcaggttttagagctagaaatagcaagttaaaataaggctagtccgttatcaacttgaaaaagtggcaccgagtcggtgccccagagtgaggattgcagaatttgttaactgagccatggaggttac

SEQ ID NO: 5403 - RNA, 143 nt, synthetic construct
  source 1..143: mol_type = other RNA; note = pegRNA
gtgtaacctccatggctcaggttttagagctagaaatagcaagttaaaataaggctagtccgttatcaacttgaaaaagtggcaccgagtcggtgccccagagtgaggattgcagaatttgttaactgagccatggaggtttt

SEQ ID NO: 5404 - RNA, 143 nt, synthetic construct
  source 1..143: mol_type = other RNA; note = pegRNA
gtgtaacctccatggctcaggttttagagctagaaatagcaagttaaaataaggctagtccgttatcaacttgaaaaagtggcaccgagtcggtgccccagagtgaggattgcagaatttgttgactgagccatggaggttac

SEQ ID NO: 5405 - RNA, 143 nt, synthetic construct
  source 1..143: mol_type = other RNA; note = pegRNA
gtgtaacctccatggctcaggttttagagctagaaatagcaagttaaaataaggctagtccgttatcaacttgaaaaagtggcaccgagtcggtgccccagagtgaggattgcagaatttgttgactgagccatggaggtttt

SEQ ID NO: 5406 - RNA, 143 nt, synthetic construct
  source 1..143: mol_type = other RNA; note = pegRNA
gtgtaacctccatggctcaggttttagagctagaaatagcaagttaaaataaggctagtccgttatcaacttgaaaaagtggcaccgagtcggtgccccagagtgaggattgcagaatttgtttactgagccatggaggttac

SEQ ID NO: 5407 - RNA, 143 nt, synthetic construct
  source 1..143: mol_type = other RNA; note = pegRNA
gtgtaacctccatggctcaggttttagagctagaaatagcaagttaaaataaggctagtccgttatcaacttgaaaaagtggcaccgagtcggtgccccagagtgaggattgcagaatttgtttactgagccatggaggtttt

SEQ ID NO: 5408 - RNA, 143 nt, synthetic construct
  source 1..143: mol_type = other RNA; note = pegRNA
gtgtaacctccatggctcaggttttagagctagaaatagcaagttaaaataaggctagtccgttatcaacttgaaaaagtggcaccgagtcggtgcctgcccagagtgaggattgcagaatttgttaactgagccatggaggt

SEQ ID NO: 5409 - RNA, 143 nt, synthetic construct
  source 1..143: mol_type = other RNA; note = pegRNA
gtgtaacctccatggctcaggttttagagctagaaatagcaagttaaaataaggctagtccgttatcaacttgaaaaagtggcaccgagtcggtgcctgcccagagtgaggattgcagaatttgttaactgagccatggtttt

SEQ ID NO: 5410 - RNA, 143 nt, synthetic construct
  source 1..143: mol_type = other RNA; note = pegRNA
gtgtaacctccatggctcaggttttagagctagaaatagcaagttaaaataaggctagtccgttatcaacttgaaaaagtggcaccgagtcggtgcctgcccagagtgaggattgcagaatttgttgactgagccatggaggt

SEQ ID NO: 5411 - RNA, 143 nt, synthetic construct
  source 1..143: mol_type = other RNA; note = pegRNA
gtgtaacctccatggctcaggttttagagctagaaatagcaagttaaaataaggctagtccgttatcaacttgaaaaagtggcaccgagtcggtgcctgcccagagtgaggattgcagaatttgttgactgagccatggtttt

SEQ ID NO: 5412 - RNA, 143 nt, synthetic construct
  source 1..143: mol_type = other RNA; note = pegRNA
gtgtaacctccatggctcaggttttagagctagaaatagcaagttaaaataaggctagtccgttatcaacttgaaaaagtggcaccgagtcggtgcctgcccagagtgaggattgcagaatttgtttactgagccatggaggt

SEQ ID NO: 5413 - RNA, 143 nt, synthetic construct
  source 1..143: mol_type = other RNA; note = pegRNA
gtgtaacctccatggctcaggttttagagctagaaatagcaagttaaaataaggctagtccgttatcaacttgaaaaagtggcaccgagtcggtgcctgcccagagtgaggattgcagaatttgtttactgagccatggtttt

SEQ ID NO: 5414 - RNA, 143 nt, synthetic construct
  source 1..143: mol_type = other RNA; note = pegRNA
gtgtaacctccatggctcaggttttagagctagaaatagcaagttaaaataaggctagtccgttatcaacttgaaaaagtggcaccgagtcggtgcgagtgaggattgcagaatttgttaactgagccatggaggttactttt

SEQ ID NO: 5415 - RNA, 143 nt, synthetic construct
  source 1..143: mol_type = other RNA; note = pegRNA
gtgtaacctccatggctcaggttttagagctagaaatagcaagttaaaataaggctagtccgttatcaacttgaaaaagtggcaccgagtcggtgcgagtgaggattgcagaatttgttgactgagccatggaggttactttt

SEQ ID NO: 5416 - RNA, 143 nt, synthetic construct
  source 1..143: mol_type = other RNA; note = pegRNA
gtgtaacctccatggctcaggttttagagctagaaatagcaagttaaaataaggctagtccgttatcaacttgaaaaagtggcaccgagtcggtgcgagtgaggattgcagaatttgtttactgagccatggaggttactttt

SEQ ID NO: 5417 - RNA, 143 nt, synthetic construct
  source 1..143: mol_type = other RNA; note = pegRNA
gtgtaacctccatggctcaggttttagagctagaaatagcaagttaaaataaggctagtccgttatcaacttgaaaaagtggcaccgagtcggtgcgcccagagtgaggattgcagaatttgttaactgagccatggaggtta

SEQ ID NO: 5418 - RNA, 143 nt, synthetic construct
  source 1..143: mol_type = other RNA; note = pegRNA
gtgtaacctccatggctcaggttttagagctagaaatagcaagttaaaataaggctagtccgttatcaacttgaaaaagtggcaccgagtcggtgcgcccagagtgaggattgcagaatttgttaactgagccatggagtttt

SEQ ID NO: 5419 - RNA, 143 nt, synthetic construct
  source 1..143: mol_type = other RNA; note = pegRNA
gtgtaacctccatggctcaggttttagagctagaaatagcaagttaaaataaggctagtccgttatcaacttgaaaaagtggcaccgagtcggtgcgcccagagtgaggattgcagaatttgttgactgagccatggaggtta

SEQ ID NO: 5420 - RNA, 143 nt, synthetic construct
  source 1..143: mol_type = other RNA; note = pegRNA
gtgtaacctccatggctcaggttttagagctagaaatagcaagttaaaataaggctagtccgttatcaacttgaaaaagtggcaccgagtcggtgcgcccagagtgaggattgcagaatttgttgactgagccatggagtttt

SEQ ID NO: 5421 - RNA, 143 nt, synthetic construct
  source 1..143: mol_type = other RNA; note = pegRNA
gtgtaacctccatggctcaggttttagagctagaaatagcaagttaaaataaggctagtccgttatcaacttgaaaaagtggcaccgagtcggtgcgcccagagtgaggattgcagaatttgtttactgagccatggaggtta

SEQ ID NO: 5422 - RNA, 143 nt, synthetic construct
  source 1..143: mol_type = other RNA; note = pegRNA
gtgtaacctccatggctcaggttttagagctagaaatagcaagttaaaataaggctagtccgttatcaacttgaaaaagtggcaccgagtcggtgcgcccagagtgaggattgcagaatttgtttactgagccatggagtttt

SEQ ID NO: 5423 - RNA, 143 nt, synthetic construct
  source 1..143: mol_type = other RNA; note = pegRNA
gtgtaacctccatggctcaggttttagagctagaaatagcaagttaaaataaggctagtccgttatcaacttgaaaaagtggcaccgagtcggtgctgcccagagtgaggattgcagaatttgttaactgagccatggaggtt

SEQ ID NO: 5424 - RNA, 143 nt, synthetic construct
  source 1..143: mol_type = other RNA; note = pegRNA
gtgtaacctccatggctcaggttttagagctagaaatagcaagttaaaataaggctagtccgttatcaacttgaaaaagtggcaccgagtcggtgctgcccagagtgaggattgcagaatttgttaactgagccatggatttt

SEQ ID NO: 5425 - RNA, 143 nt, synthetic construct
  source 1..143: mol_type = other RNA; note = pegRNA
gtgtaacctccatggctcaggttttagagctagaaatagcaagttaaaataaggctagtccgttatcaacttgaaaaagtggcaccgagtcggtgctgcccagagtgaggattgcagaatttgttgactgagccatggaggtt

SEQ ID NO: 5426 - RNA, 143 nt, synthetic construct
  source 1..143: mol_type = other RNA; note = pegRNA
gtgtaacctccatggctcaggttttagagctagaaatagcaagttaaaataaggctagtccgttatcaacttgaaaaagtggcaccgagtcggtgctgcccagagtgaggattgcagaatttgttgactgagccatggatttt

SEQ ID NO: 5427 - RNA, 143 nt, synthetic construct
  source 1..143: mol_type = other RNA; note = pegRNA
gtgtaacctccatggctcaggttttagagctagaaatagcaagttaaaataaggctagtccgttatcaacttgaaaaagtggcaccgagtcggtgctgcccagagtgaggattgcagaatttgtttactgagccatggaggtt

SEQ ID NO: 5428 - RNA, 143 nt, synthetic construct
  source 1..143: mol_type = other RNA; note = pegRNA
gtgtaacctccatggctcaggttttagagctagaaatagcaagttaaaataaggctagtccgttatcaacttgaaaaagtggcaccgagtcggtgctgcccagagtgaggattgcagaatttgtttactgagccatggatttt

SEQ ID NO: 5429 - RNA, 144 nt, synthetic construct
  source 1..144: mol_type = other RNA; note = pegRNA
gtgtaacctccatggctcaggttttagagctagaaatagcaagttaaaataaggctagtccgttatcaacttgaaaaagtggcaccgagtcggtgcacactgcccagagtgaggattgcagaatttgttaactgagccatggag

SEQ ID NO: 5430 - RNA, 144 nt, synthetic construct
  source 1..144: mol_type = other RNA; note = pegRNA
gtgtaacctccatggctcaggttttagagctagaaatagcaagttaaaataaggctagtccgttatcaacttgaaaaagtggcaccgagtcggtgcacactgcccagagtgaggattgcagaatttgttgactgagccatggag

SEQ ID NO: 5431 - RNA, 144 nt, synthetic construct
  source 1..144: mol_type = other RNA; note = pegRNA
gtgtaacctccatggctcaggttttagagctagaaatagcaagttaaaataaggctagtccgttatcaacttgaaaaagtggcaccgagtcggtgcacactgcccagagtgaggattgcagaatttgtttactgagccatggag

SEQ ID NO: 5432 - RNA, 144 nt, synthetic construct
  source 1..144: mol_type = other RNA; note = pegRNA
gtgtaacctccatggctcaggttttagagctagaaatagcaagttaaaataaggctagtccgttatcaacttgaaaaagtggcaccgagtcggtgcactgcccagagtgaggattgcagaatttgttaactgagccatggaggt

SEQ ID NO: 5433 - RNA, 144 nt, synthetic construct
  source 1..144: mol_type = other RNA; note = pegRNA
gtgtaacctccatggctcaggttttagagctagaaatagcaagttaaaataaggctagtccgttatcaacttgaaaaagtggcaccgagtcggtgcactgcccagagtgaggattgcagaatttgttaactgagccatggtttt

SEQ ID NO: 5434 - RNA, 144 nt, synthetic construct
  source 1..144: mol_type = other RNA; note = pegRNA
gtgtaacctccatggctcaggttttagagctagaaatagcaagttaaaataaggctagtccgttatcaacttgaaaaagtggcaccgagtcggtgcactgcccagagtgaggattgcagaatttgttgactgagccatggaggt

SEQ ID NO: 5435 - RNA, 144 nt, synthetic construct
  source 1..144: mol_type = other RNA; note = pegRNA
gtgtaacctccatggctcaggttttagagctagaaatagcaagttaaaataaggctagtccgttatcaacttgaaaaagtggcaccgagtcggtgcactgcccagagtgaggattgcagaatttgttgactgagccatggtttt

SEQ ID NO: 5436 - RNA, 144 nt, synthetic construct
  source 1..144: mol_type = other RNA; note = pegRNA
gtgtaacctccatggctcaggttttagagctagaaatagcaagttaaaataaggctagtccgttatcaacttgaaaaagtggcaccgagtcggtgcactgcccagagtgaggattgcagaatttgtttactgagccatggaggt

SEQ ID NO: 5437 - RNA, 144 nt, synthetic construct
  source 1..144: mol_type = other RNA; note = pegRNA
gtgtaacctccatggctcaggttttagagctagaaatagcaagttaaaataaggctagtccgttatcaacttgaaaaagtggcaccgagtcggtgcactgcccagagtgaggattgcagaatttgtttactgagccatggtttt

SEQ ID NO: 5438 - RNA, 144 nt, synthetic construct
  source 1..144: mol_type = other RNA; note = pegRNA
gtgtaacctccatggctcaggttttagagctagaaatagcaagttaaaataaggctagtccgttatcaacttgaaaaagtggcaccgagtcggtgcagagtgaggattgcagaatttgttaactgagccatggaggttactttt

SEQ ID NO: 5439 - RNA, 144 nt, synthetic construct
  source 1..144: mol_type = other RNA; note = pegRNA
gtgtaacctccatggctcaggttttagagctagaaatagcaagttaaaataaggctagtccgttatcaacttgaaaaagtggcaccgagtcggtgcagagtgaggattgcagaatttgttgactgagccatggaggttactttt

SEQ ID NO: 5440 - RNA, 144 nt, synthetic construct
  source 1..144: mol_type = other RNA; note = pegRNA
gtgtaacctccatggctcaggttttagagctagaaatagcaagttaaaataaggctagtccgttatcaacttgaaaaagtggcaccgagtcggtgcagagtgaggattgcagaatttgtttactgagccatggaggttactttt

SEQ ID NO: 5441 - RNA, 144 nt, synthetic construct
  source 1..144: mol_type = other RNA; note = pegRNA
gtgtaacctccatggctcaggttttagagctagaaatagcaagttaaaataaggctagtccgttatcaacttgaaaaagtggcaccgagtcggtgccacactgcccagagtgaggattgcagaatttgttaactgagccatgga

SEQ ID NO: 5442 - RNA, 144 nt, synthetic construct
  source 1..144: mol_type = other RNA; note = pegRNA
gtgtaacctccatggctcaggttttagagctagaaatagcaagttaaaataaggctagtccgttatcaacttgaaaaagtggcaccgagtcggtgccacactgcccagagtgaggattgcagaatttgttgactgagccatgga

SEQ ID NO: 5443 - RNA, 144 nt, synthetic construct
  source 1..144: mol_type = other RNA; note = pegRNA
gtgtaacctccatggctcaggttttagagctagaaatagcaagttaaaataaggctagtccgttatcaacttgaaaaagtggcaccgagtcggtgccacactgcccagagtgaggattgcagaatttgtttactgagccatgga

SEQ ID NO: 5444 - RNA, 144 nt, synthetic construct
  source 1..144: mol_type = other RNA; note = pegRNA
gtgtaacctccatggctcaggttttagagctagaaatagcaagttaaaataaggctagtccgttatcaacttgaaaaagtggcaccgagtcggtgccactgcccagagtgaggattgcagaatttgttaactgagccatggagg

SEQ ID NO: 5445 - RNA, 144 nt, synthetic construct
  source 1..144: mol_type = other RNA; note = pegRNA
gtgtaacctccatggctcaggttttagagctagaaatagcaagttaaaataaggctagtccgttatcaacttgaaaaagtggcaccgagtcggtgccactgcccagagtgaggattgcagaatttgttgactgagccatggagg

SEQ ID NO: 5446 - RNA, 144 nt, synthetic construct
  source 1..144: mol_type = other RNA; note = pegRNA
gtgtaacctccatggctcaggttttagagctagaaatagcaagttaaaataaggctagtccgttatcaacttgaaaaagtggcaccgagtcggtgccactgcccagagtgaggattgcagaatttgtttactgagccatggagg

SEQ ID NO: 5447 - RNA, 144 nt, synthetic construct
  source 1..144: mol_type = other RNA; note = pegRNA
gtgtaacctccatggctcaggttttagagctagaaatagcaagttaaaataaggctagtccgttatcaacttgaaaaagtggcaccgagtcggtgccagagtgaggattgcagaatttgttaactgagccatggaggttatttt

SEQ ID NO: 5448 - RNA, 144 nt, synthetic construct
  source 1..144: mol_type = other RNA; note = pegRNA
gtgtaacctccatggctcaggttttagagctagaaatagcaagttaaaataaggctagtccgttatcaacttgaaaaagtggcaccgagtcggtgccagagtgaggattgcagaatttgttgactgagccatggaggttatttt

SEQ ID NO: 5449 - RNA, 144 nt, synthetic construct
  source 1..144: mol_type = other RNA; note = pegRNA
gtgtaacctccatggctcaggttttagagctagaaatagcaagttaaaataaggctagtccgttatcaacttgaaaaagtggcaccgagtcggtgccagagtgaggattgcagaatttgtttactgagccatggaggttatttt

SEQ ID NO: 5450 - RNA, 144 nt, synthetic construct
  source 1..144: mol_type = other RNA; note = pegRNA
gtgtaacctccatggctcaggttttagagctagaaatagcaagttaaaataaggctagtccgttatcaacttgaaaaagtggcaccgagtcggtgcccagagtgaggattgcagaatttgttaactgagccatggaggtttttt

SEQ ID NO: 5451 - RNA, 144 nt, synthetic construct
  source 1..144: mol_type = other RNA; note = pegRNA
gtgtaacctccatggctcaggttttagagctagaaatagcaagttaaaataaggctagtccgttatcaacttgaaaaagtggcaccgagtcggtgcccagagtgaggattgcagaatttgttgactgagccatggaggtttttt

SEQ ID NO: 5452 - RNA, 144 nt, synthetic construct
  source 1..144: mol_type = other RNA; note = pegRNA
gtgtaacctccatggctcaggttttagagctagaaatagcaagttaaaataaggctagtccgttatcaacttgaaaaagtggcaccgagtcggtgcccagagtgaggattgcagaatttgtttactgagccatggaggtttttt

SEQ ID NO: 5453 - RNA, 144 nt, synthetic construct
  source 1..144: mol_type = other RNA; note = pegRNA
gtgtaacctccatggctcaggttttagagctagaaatagcaagttaaaataaggctagtccgttatcaacttgaaaaagtggcaccgagtcggtgccccagagtgaggattgcagaatttgttaactgagccatggaggttaca

SEQ ID NO: 5454 - RNA, 144 nt, synthetic construct
  source 1..144: mol_type = other RNA; note = pegRNA
gtgtaacctccatggctcaggttttagagctagaaatagcaagttaaaataaggctagtccgttatcaacttgaaaaagtggcaccgagtcggtgccccagagtgaggattgcagaatttgttaactgagccatggaggttttt

SEQ ID NO: 5455 - RNA, 144 nt, synthetic construct
  source 1..144: mol_type = other RNA; note = pegRNA
gtgtaacctccatggctcaggttttagagctagaaatagcaagttaaaataaggctagtccgttatcaacttgaaaaagtggcaccgagtcggtgccccagagtgaggattgcagaatttgttgactgagccatggaggttaca

SEQ ID NO: 5456 - RNA, 144 nt, synthetic construct
  source 1..144: mol_type = other RNA; note = pegRNA
gtgtaacctccatggctcaggttttagagctagaaatagcaagttaaaataaggctagtccgttatcaacttgaaaaagtggcaccgagtcggtgccccagagtgaggattgcagaatttgttgactgagccatggaggttttt

SEQ ID NO: 5457 - RNA, 144 nt, synthetic construct
  source 1..144: mol_type = other RNA; note = pegRNA
gtgtaacctccatggctcaggttttagagctagaaatagcaagttaaaataaggctagtccgttatcaacttgaaaaagtggcaccgagtcggtgccccagagtgaggattgcagaatttgtttactgagccatggaggttaca

SEQ ID NO: 5458 - RNA, 144 nt, synthetic construct
  source 1..144: mol_type = other RNA; note = pegRNA
gtgtaacctccatggctcaggttttagagctagaaatagcaagttaaaataaggctagtccgttatcaacttgaaaaagtggcaccgagtcggtgccccagagtgaggattgcagaatttgtttactgagccatggaggttttt

SEQ ID NO: 5459 - RNA, 144 nt, synthetic construct
  source 1..144: mol_type = other RNA; note = pegRNA
gtgtaacctccatggctcaggttttagagctagaaatagcaagttaaaataaggctagtccgttatcaacttgaaaaagtggcaccgagtcggtgcctgcccagagtgaggattgcagaatttgttaactgagccatggaggtt

SEQ ID NO: 5460 - RNA, 144 nt, synthetic construct
  source 1..144: mol_type = other RNA; note = pegRNA
gtgtaacctccatggctcaggttttagagctagaaatagcaagttaaaataaggctagtccgttatcaacttgaaaaagtggcaccgagtcggtgcctgcccagagtgaggattgcagaatttgttaactgagccatggatttt

SEQ ID NO: 5461 - RNA, 144 nt, synthetic construct
  source 1..144: mol_type = other RNA; note = pegRNA
gtgtaacctccatggctcaggttttagagctagaaatagcaagttaaaataaggctagtccgttatcaacttgaaaaagtggcaccgagtcggtgcctgcccagagtgaggattgcagaatttgttgactgagccatggaggtt

SEQ ID NO: 5462 - RNA, 144 nt, synthetic construct
  source 1..144: mol_type = other RNA; note = pegRNA
gtgtaacctccatggctcaggttttagagctagaaatagcaagttaaaataaggctagtccgttatcaacttgaaaaagtggcaccgagtcggtgcctgcccagagtgaggattgcagaatttgttgactgagccatggatttt

SEQ ID NO: 5463 - RNA, 144 nt, synthetic construct
  source 1..144: mol_type = other RNA; note = pegRNA
gtgtaacctccatggctcaggttttagagctagaaatagcaagttaaaataaggctagtccgttatcaacttgaaaaagtggcaccgagtcggtgcctgcccagagtgaggattgcagaatttgtttactgagccatggaggtt

SEQ ID NO: 5464 - RNA, 144 nt, synthetic construct
  source 1..144: mol_type = other RNA; note = pegRNA
gtgtaacctccatggctcaggttttagagctagaaatagcaagttaaaataaggctagtccgttatcaacttgaaaaagtggcaccgagtcggtgcctgcccagagtgaggattgcagaatttgtttactgagccatggatttt

SEQ ID NO: 5465 - RNA, 144 nt, synthetic construct
  source 1..144: mol_type = other RNA; note = pegRNA
gtgtaacctccatggctcaggttttagagctagaaatagcaagttaaaataaggctagtccgttatcaacttgaaaaagtggcaccgagtcggtgcgagtgaggattgcagaatttgttaactgagccatggaggttacatttt

SEQ ID NO: 5466 - RNA, 144 nt, synthetic construct
  source 1..144: mol_type = other RNA; note = pegRNA
gtgtaacctccatggctcaggttttagagctagaaatagcaagttaaaataaggctagtccgttatcaacttgaaaaagtggcaccgagtcggtgcgagtgaggattgcagaatttgttgactgagccatggaggttacatttt

SEQ ID NO: 5467 - RNA, 144 nt, synthetic construct
  source 1..144: mol_type = other RNA; note = pegRNA
gtgtaacctccatggctcaggttttagagctagaaatagcaagttaaaataaggctagtccgttatcaacttgaaaaagtggcaccgagtcggtgcgagtgaggattgcagaatttgtttactgagccatggaggttacatttt

SEQ ID NO: 5468 - RNA, 144 nt, synthetic construct
  source 1..144: mol_type = other RNA; note = pegRNA
gtgtaacctccatggctcaggttttagagctagaaatagcaagttaaaataaggctagtccgttatcaacttgaaaaagtggcaccgagtcggtgcgcccagagtgaggattgcagaatttgttaactgagccatggaggttac

SEQ ID NO: 5469 - RNA, 144 nt, synthetic construct
  source 1..144: mol_type = other RNA; note = pegRNA
gtgtaacctccatggctcaggttttagagctagaaatagcaagttaaaataaggctagtccgttatcaacttgaaaaagtggcaccgagtcggtgcgcccagagtgaggattgcagaatttgttaactgagccatggaggtttt

SEQ ID NO: 5470 - RNA, 144 nt, synthetic construct
  source 1..144: mol_type = other RNA; note = pegRNA
gtgtaacctccatggctcaggttttagagctagaaatagcaagttaaaataaggctagtccgttatcaacttgaaaaagtggcaccgagtcggtgcgcccagagtgaggattgcagaatttgttgactgagccatggaggttac

SEQ ID NO: 5471 - RNA, 144 nt, synthetic construct
  source 1..144: mol_type = other RNA; note = pegRNA
gtgtaacctccatggctcaggttttagagctagaaatagcaagttaaaataaggctagtccgttatcaacttgaaaaagtggcaccgagtcggtgcgcccagagtgaggattgcagaatttgttgactgagccatggaggtttt

SEQ ID NO: 5472 - RNA, 144 nt, synthetic construct
  source 1..144: mol_type = other RNA; note = pegRNA
gtgtaacctccatggctcaggttttagagctagaaatagcaagttaaaataaggctagtccgttatcaacttgaaaaagtggcaccgagtcggtgcgcccagagtgaggattgcagaatttgtttactgagccatggaggttac

SEQ ID NO: 5473 - RNA, 144 nt, synthetic construct
  source 1..144: mol_type = other RNA; note = pegRNA
gtgtaacctccatggctcaggttttagagctagaaatagcaagttaaaataaggctagtccgttatcaacttgaaaaagtggcaccgagtcggtgcgcccagagtgaggattgcagaatttgtttactgagccatggaggtttt

SEQ ID NO: 5474 - RNA, 144 nt, synthetic construct
  source 1..144: mol_type = other RNA; note = pegRNA
gtgtaacctccatggctcaggttttagagctagaaatagcaagttaaaataaggctagtccgttatcaacttgaaaaagtggcaccgagtcggtgctcacactgcccagagtgaggattgcagaatttgttaactgagccatgg

SEQ ID NO: 5475 - RNA, 144 nt, synthetic construct
  source 1..144: mol_type = other RNA; note = pegRNA
gtgtaacctccatggctcaggttttagagctagaaatagcaagttaaaataaggctagtccgttatcaacttgaaaaagtggcaccgagtcggtgctcacactgcccagagtgaggattgcagaatttgttgactgagccatgg

SEQ ID NO: 5476 - RNA, 144 nt, synthetic construct
  source 1..144: mol_type = other RNA; note = pegRNA
gtgtaacctccatggctcaggttttagagctagaaatagcaagttaaaataaggctagtccgttatcaacttgaaaaagtggcaccgagtcggtgctcacactgcccagagtgaggattgcagaatttgtttactgagccatgg

SEQ ID NO: 5477 - RNA, 144 nt, synthetic construct
  source 1..144: mol_type = other RNA; note = pegRNA
gtgtaacctccatggctcaggttttagagctagaaatagcaagttaaaataaggctagtccgttatcaacttgaaaaagtggcaccgagtcggtgctgcccagagtgaggattgcagaatttgttaactgagccatggaggtta

SEQ ID NO: 5478 - RNA, 144 nt, synthetic construct
  source 1..144: mol_type = other RNA; note = pegRNA
gtgtaacctccatggctcaggttttagagctagaaatagcaagttaaaataaggctagtccgttatcaacttgaaaaagtggcaccgagtcggtgctgcccagagtgaggattgcagaatttgttaactgagccatggagtttt

SEQ ID NO: 5479 - RNA, 144 nt, synthetic construct
  source 1..144: mol_type = other RNA; note = pegRNA
gtgtaacctccatggctcaggttttagagctagaaatagcaagttaaaataaggctagtccgttatcaacttgaaaaagtggcaccgagtcggtgctgcccagagtgaggattgcagaatttgttgactgagccatggaggtta

SEQ ID NO: 5480 - RNA, 144 nt, synthetic construct
  source 1..144: mol_type = other RNA; note = pegRNA
gtgtaacctccatggctcaggttttagagctagaaatagcaagttaaaataaggctagtccgttatcaacttgaaaaagtggcaccgagtcggtgctgcccagagtgaggattgcagaatttgttgactgagccatggagtttt

SEQ ID NO: 5481 - RNA, 144 nt, synthetic construct
  source 1..144: mol_type = other RNA; note = pegRNA
gtgtaacctccatggctcaggttttagagctagaaatagcaagttaaaataaggctagtccgttatcaacttgaaaaagtggcaccgagtcggtgctgcccagagtgaggattgcagaatttgtttactgagccatggaggtta

SEQ ID NO: 5482 - RNA, 144 nt, synthetic construct
  source 1..144: mol_type = other RNA; note = pegRNA
gtgtaacctccatggctcaggttttagagctagaaatagcaagttaaaataaggctagtccgttatcaacttgaaaaagtggcaccgagtcggtgctgcccagagtgaggattgcagaatttgtttactgagccatggagtttt

SEQ ID NO: 5483 - RNA, 145 nt, synthetic construct
  source 1..145: mol_type = other RNA; note = pegRNA
gtgtaacctccatggctcaggttttagagctagaaatagcaagttaaaataaggctagtccgttatcaacttgaaaaagtggcaccgagtcggtgcacactgcccagagtgaggattgcagaatttgttaactgagccatggagg

SEQ ID NO: 5484 - RNA, 145 nt, synthetic construct
  source 1..145: mol_type = other RNA; note = pegRNA
gtgtaacctccatggctcaggttttagagctagaaatagcaagttaaaataaggctagtccgttatcaacttgaaaaagtggcaccgagtcggtgcacactgcccagagtgaggattgcagaatttgttgactgagccatggagg

SEQ ID NO: 5485 - RNA, 145 nt, synthetic construct
  source 1..145: mol_type = other RNA; note = pegRNA
gtgtaacctccatggctcaggttttagagctagaaatagcaagttaaaataaggctagtccgttatcaacttgaaaaagtggcaccgagtcggtgcacactgcccagagtgaggattgcagaatttgtttactgagccatggagg

SEQ ID NO: 5486 - RNA, 145 nt, synthetic construct
  source 1..145: mol_type = other RNA; note = pegRNA
gtgtaacctccatggctcaggttttagagctagaaatagcaagttaaaataaggctagtccgttatcaacttgaaaaagtggcaccgagtcggtgcactgcccagagtgaggattgcagaatttgttaactgagccatggaggtt

SEQ ID NO: 5487 - RNA, 145 nt, synthetic construct
  source 1..145: mol_type = other RNA; note = pegRNA
gtgtaacctccatggctcaggttttagagctagaaatagcaagttaaaataaggctagtccgttatcaacttgaaaaagtggcaccgagtcggtgcactgcccagagtgaggattgcagaatttgttaactgagccatggatttt

SEQ ID NO: 5488 - RNA, 145 nt, synthetic construct
  source 1..145: mol_type = other RNA; note = pegRNA
gtgtaacctccatggctcaggttttagagctagaaatagcaagttaaaataaggctagtccgttatcaacttgaaaaagtggcaccgagtcggtgcactgcccagagtgaggattgcagaatttgttgactgagccatggaggtt

SEQ ID NO: 5489 - RNA, 145 nt, synthetic construct
  source 1..145: mol_type = other RNA; note = pegRNA
gtgtaacctccatggctcaggttttagagctagaaatagcaagttaaaataaggctagtccgttatcaacttgaaaaagtggcaccgagtcggtgcactgcccagagtgaggattgcagaatttgttgactgagccatggatttt

SEQ ID NO: 5490 - RNA, 145 nt, synthetic construct
  source 1..145: mol_type = other RNA; note = pegRNA
gtgtaacctccatggctcaggttttagagctagaaatagcaagttaaaataaggctagtccgttatcaacttgaaaaagtggcaccgagtcggtgcactgcccagagtgaggattgcagaatttgtttactgagccatggaggtt

SEQ ID NO: 5491 - RNA, 145 nt, synthetic construct
  source 1..145: mol_type = other RNA; note = pegRNA
gtgtaacctccatggctcaggttttagagctagaaatagcaagttaaaataaggctagtccgttatcaacttgaaaaagtggcaccgagtcggtgcactgcccagagtgaggattgcagaatttgtttactgagccatggatttt

SEQ ID NO: 5492 - RNA, 145 nt, synthetic construct
  source 1..145: mol_type = other RNA; note = pegRNA
gtgtaacctccatggctcaggttttagagctagaaatagcaagttaaaataaggctagtccgttatcaacttgaaaaagtggcaccgagtcggtgcagagtgaggattgcagaatttgttaactgagccatggaggttacatttt

SEQ ID NO: 5493 - RNA, 145 nt, synthetic construct
  source 1..145: mol_type = other RNA; note = pegRNA
gtgtaacctccatggctcaggttttagagctagaaatagcaagttaaaataaggctagtccgttatcaacttgaaaaagtggcaccgagtcggtgcagagtgaggattgcagaatttgttgactgagccatggaggttacatttt

SEQ ID NO: 5494 - RNA, 145 nt, synthetic construct
  source 1..145: mol_type = other RNA; note = pegRNA
gtgtaacctccatggctcaggttttagagctagaaatagcaagttaaaataaggctagtccgttatcaacttgaaaaagtggcaccgagtcggtgcagagtgaggattgcagaatttgtttactgagccatggaggttacatttt

SEQ ID NO: 5495 - RNA, 145 nt, synthetic construct
  source 1..145: mol_type = other RNA; note = pegRNA
gtgtaacctccatggctcaggttttagagctagaaatagcaagttaaaataaggctagtccgttatcaacttgaaaaagtggcaccgagtcggtgccacactgcccagagtgaggattgcagaatttgttaactgagccatggag

SEQ ID NO: 5496 - RNA, 145 nt, synthetic construct
  source 1..145: mol_type = other RNA; note = pegRNA
gtgtaacctccatggctcaggttttagagctagaaatagcaagttaaaataaggctagtccgttatcaacttgaaaaagtggcaccgagtcggtgccacactgcccagagtgaggattgcagaatttgttgactgagccatggag

SEQ ID NO: 5497 - RNA, 145 nt, synthetic construct
  source 1..145: mol_type = other RNA; note = pegRNA
gtgtaacctccatggctcaggttttagagctagaaatagcaagttaaaataaggctagtccgttatcaacttgaaaaagtggcaccgagtcggtgccacactgcccagagtgaggattgcagaatttgtttactgagccatggag

SEQ ID NO: 5498 - RNA, 145 nt, synthetic construct
  source 1..145: mol_type = other RNA; note = pegRNA
gtgtaacctccatggctcaggttttagagctagaaatagcaagttaaaataaggctagtccgttatcaacttgaaaaagtggcaccgagtcggtgccactgcccagagtgaggattgcagaatttgttaactgagccatggaggt

SEQ ID NO: 5499 - RNA, 145 nt, synthetic construct
  source 1..145: mol_type = other RNA; note = pegRNA
gtgtaacctccatggctcaggttttagagctagaaatagcaagttaaaataaggctagtccgttatcaacttgaaaaagtggcaccgagtcggtgccactgcccagagtgaggattgcagaatttgttaactgagccatggtttt

SEQ ID NO: 5500 - RNA, 145 nt, synthetic construct
  source 1..145: mol_type = other RNA; note = pegRNA
gtgtaacctccatggctcaggttttagagctagaaatagcaagttaaaataaggctagtccgttatcaacttgaaaaagtggcaccgagtcggtgccactgcccagagtgaggattgcagaatttgttgactgagccatggaggt

SEQ ID NO: 5501 - RNA, 145 nt, synthetic construct
  source 1..145: mol_type = other RNA; note = pegRNA
gtgtaacctccatggctcaggttttagagctagaaatagcaagttaaaataaggctagtccgttatcaacttgaaaaagtggcaccgagtcggtgccactgcccagagtgaggattgcagaatttgttgactgagccatggtttt

SEQ ID NO: 5502 - RNA, 145 nt, synthetic construct
  source 1..145: mol_type = other RNA; note = pegRNA
gtgtaacctccatggctcaggttttagagctagaaatagcaagttaaaataaggctagtccgttatcaacttgaaaaagtggcaccgagtcggtgccactgcccagagtgaggattgcagaatttgtttactgagccatggaggt

SEQ ID NO: 5503 - RNA, 145 nt, synthetic construct
  source 1..145: mol_type = other RNA; note = pegRNA
gtgtaacctccatggctcaggttttagagctagaaatagcaagttaaaataaggctagtccgttatcaacttgaaaaagtggcaccgagtcggtgccactgcccagagtgaggattgcagaatttgtttactgagccatggtttt

SEQ ID NO: 5504 - RNA, 145 nt, synthetic construct
  source 1..145: mol_type = other RNA; note = pegRNA
gtgtaacctccatggctcaggttttagagctagaaatagcaagttaaaataaggctagtccgttatcaacttgaaaaagtggcaccgagtcggtgccagagtgaggattgcagaatttgttaactgagccatggaggttactttt

SEQ ID NO: 5505 - RNA, 145 nt, synthetic construct
  source 1..145: mol_type = other RNA; note = pegRNA
gtgtaacctccatggctcaggttttagagctagaaatagcaagttaaaataaggctagtccgttatcaacttgaaaaagtggcaccgagtcggtgccagagtgaggattgcagaatttgttgactgagccatggaggttactttt

SEQ ID NO: 5506 - RNA, 145 nt, synthetic construct
  source 1..145: mol_type = other RNA; note = pegRNA
gtgtaacctccatggctcaggttttagagctagaaatagcaagttaaaataaggctagtccgttatcaacttgaaaaagtggcaccgagtcggtgccagagtgaggattgcagaatttgtttactgagccatggaggttactttt

SEQ ID NO: 5507 - RNA, 145 nt, synthetic construct
  source 1..145: mol_type = other RNA; note = pegRNA
gtgtaacctccatggctcaggttttagagctagaaatagcaagttaaaataaggctagtccgttatcaacttgaaaaagtggcaccgagtcggtgcccagagtgaggattgcagaatttgttaactgagccatggaggttatttt

SEQ ID NO: 5508 - RNA, 145 nt, synthetic construct
  source 1..145: mol_type = other RNA; note = pegRNA
gtgtaacctccatggctcaggttttagagctagaaatagcaagttaaaataaggctagtccgttatcaacttgaaaaagtggcaccgagtcggtgcccagagtgaggattgcagaatttgttgactgagccatggaggttatttt

SEQ ID NO: 5509 - RNA, 145 nt, synthetic construct
  source 1..145: mol_type = other RNA; note = pegRNA
gtgtaacctccatggctcaggttttagagctagaaatagcaagttaaaataaggctagtccgttatcaacttgaaaaagtggcaccgagtcggtgcccagagtgaggattgcagaatttgtttactgagccatggaggttatttt

SEQ ID NO: 5510 - RNA, 145 nt, synthetic construct
  source 1..145: mol_type = other RNA; note = pegRNA
gtgtaacctccatggctcaggttttagagctagaaatagcaagttaaaataaggctagtccgttatcaacttgaaaaagtggcaccgagtcggtgccccagagtgaggattgcagaatttgttaactgagccatggaggtttttt

SEQ ID NO: 5511 - RNA, 145 nt, synthetic construct
  source 1..145: mol_type = other RNA; note = pegRNA
gtgtaacctccatggctcaggttttagagctagaaatagcaagttaaaataaggctagtccgttatcaacttgaaaaagtggcaccgagtcggtgccccagagtgaggattgcagaatttgttgactgagccatggaggtttttt

SEQ ID NO: 5512 - RNA, 145 nt, synthetic construct
  source 1..145: mol_type = other RNA; note = pegRNA
gtgtaacctccatggctcaggttttagagctagaaatagcaagttaaaataaggctagtccgttatcaacttgaaaaagtggcaccgagtcggtgccccagagtgaggattgcagaatttgtttactgagccatggaggtttttt

SEQ ID NO: 5513 - RNA, 145 nt, synthetic construct
  source 1..145: mol_type = other RNA; note = pegRNA
gtgtaacctccatggctcaggttttagagctagaaatagcaagttaaaataaggctagtccgttatcaacttgaaaaagtggcaccgagtcggtgcctgcccagagtgaggattgcagaatttgttaactgagccatggaggtta

SEQ ID NO: 5514 - RNA, 145 nt, synthetic construct
  source 1..145: mol_type = other RNA; note = pegRNA
gtgtaacctccatggctcaggttttagagctagaaatagcaagttaaaataaggctagtccgttatcaacttgaaaaagtggcaccgagtcggtgcctgcccagagtgaggattgcagaatttgttaactgagccatggagtttt

SEQ ID NO: 5515 - RNA, 145 nt, synthetic construct
  source 1..145: mol_type = other RNA; note = pegRNA
gtgtaacctccatggctcaggttttagagctagaaatagcaagttaaaataaggctagtccgttatcaacttgaaaaagtggcaccgagtcggtgcctgcccagagtgaggattgcagaatttgttgactgagccatggaggtta

SEQ ID NO: 5516 - RNA, 145 nt, synthetic construct
  source 1..145: mol_type = other RNA; note = pegRNA
gtgtaacctccatggctcaggttttagagctagaaatagcaagttaaaataaggctagtccgttatcaacttgaaaaagtggcaccgagtcggtgcctgcccagagtgaggattgcagaatttgttgactgagccatggagtttt

SEQ ID NO: 5517 - RNA, 145 nt, synthetic construct
  source 1..145: mol_type = other RNA; note = pegRNA
gtgtaacctccatggctcaggttttagagctagaaatagcaagttaaaataaggctagtccgttatcaacttgaaaaagtggcaccgagtcggtgcctgcccagagtgaggattgcagaatttgtttactgagccatggaggtta

SEQ ID NO: 5518 - RNA, 145 nt, synthetic construct
  source 1..145: mol_type = other RNA; note = pegRNA
gtgtaacctccatggctcaggttttagagctagaaatagcaagttaaaataaggctagtccgttatcaacttgaaaaagtggcaccgagtcggtgcctgcccagagtgaggattgcagaatttgtttactgagccatggagtttt

SEQ ID NO: 5519 - RNA, 145 nt, synthetic construct
  source 1..145: mol_type = other RNA; note = pegRNA
gtgtaacctccatggctcaggttttagagctagaaatagcaagttaaaataaggctagtccgttatcaacttgaaaaagtggcaccgagtcggtgcgcccagagtgaggattgcagaatttgttaactgagccatggaggttaca

SEQ ID NO: 5520 - RNA, 145 nt, synthetic construct
  source 1..145: mol_type = other RNA; note = pegRNA
gtgtaacctccatggctcaggttttagagctagaaatagcaagttaaaataaggctagtccgttatcaacttgaaaaagtggcaccgagtcggtgcgcccagagtgaggattgcagaatttgttaactgagccatggaggttttt

SEQ ID NO: 5521 - RNA, 145 nt, synthetic construct
  source 1..145: mol_type = other RNA; note = pegRNA
gtgtaacctccatggctcaggttttagagctagaaatagcaagttaaaataaggctagtccgttatcaacttgaaaaagtggcaccgagtcggtgcgcccagagtgaggattgcagaatttgttgactgagccatggaggttaca

SEQ ID NO: 5522 - RNA, 145 nt, synthetic construct
  source 1..145: mol_type = other RNA; note = pegRNA
gtgtaacctccatggctcaggttttagagctagaaatagcaagttaaaataaggctagtccgttatcaacttgaaaaagtggcaccgagtcggtgcgcccagagtgaggattgcagaatttgttgactgagccatggaggttttt

SEQ ID NO: 5523 - RNA, 145 nt, synthetic construct
  source 1..145: mol_type = other RNA; note = pegRNA
gtgtaacctccatggctcaggttttagagctagaaatagcaagttaaaataaggctagtccgttatcaacttgaaaaagtggcaccgagtcggtgcgcccagagtgaggattgcagaatttgtttactgagccatggaggttaca

SEQ ID NO: 5524 - RNA, 145 nt, synthetic construct
  source 1..145: mol_type = other RNA; note = pegRNA
gtgtaacctccatggctcaggttttagagctagaaatagcaagttaaaataaggctagtccgttatcaacttgaaaaagtggcaccgagtcggtgcgcccagagtgaggattgcagaatttgtttactgagccatggaggttttt

SEQ ID NO: 5525 - RNA, 145 nt, synthetic construct
  source 1..145: mol_type = other RNA; note = pegRNA
gtgtaacctccatggctcaggttttagagctagaaatagcaagttaaaataaggctagtccgttatcaacttgaaaaagtggcaccgagtcggtgctcacactgcccagagtgaggattgcagaatttgttaactgagccatgga

SEQ ID NO: 5526 - RNA, 145 nt, synthetic construct
  source 1..145: mol_type = other RNA; note = pegRNA
gtgtaacctccatggctcaggttttagagctagaaatagcaagttaaaataaggctagtccgttatcaacttgaaaaagtggcaccgagtcggtgctcacactgcccagagtgaggattgcagaatttgttgactgagccatgga

SEQ ID NO: 5527 - RNA, 145 nt, synthetic construct
  source 1..145: mol_type = other RNA; note = pegRNA
gtgtaacctccatggctcaggttttagagctagaaatagcaagttaaaataaggctagtccgttatcaacttgaaaaagtggcaccgagtcggtgctcacactgcccagagtgaggattgcagaatttgtttactgagccatgga

SEQ ID NO: 5528 - RNA, 145 nt, synthetic construct
  source 1..145: mol_type = other RNA; note = pegRNA
gtgtaacctccatggctcaggttttagagctagaaatagcaagttaaaataaggctagtccgttatcaacttgaaaaagtggcaccgagtcggtgctgcccagagtgaggattgcagaatttgttaactgagccatggaggttac

SEQ ID NO: 5529 - RNA, 145 nt, synthetic construct
  source 1..145: mol_type = other RNA; note = pegRNA
gtgtaacctccatggctcaggttttagagctagaaatagcaagttaaaataaggctagtccgttatcaacttgaaaaagtggcaccgagtcggtgctgcccagagtgaggattgcagaatttgttaactgagccatggaggtttt

SEQ ID NO: 5530 - RNA, 145 nt, synthetic construct
  source 1..145: mol_type = other RNA; note = pegRNA
gtgtaacctccatggctcaggttttagagctagaaatagcaagttaaaataaggctagtccgttatcaacttgaaaaagtggcaccgagtcggtgctgcccagagtgaggattgcagaatttgttgactgagccatggaggttac

SEQ ID NO: 5531 - RNA, 145 nt, synthetic construct
  source 1..145: mol_type = other RNA; note = pegRNA
gtgtaacctccatggctcaggttttagagctagaaatagcaagttaaaataaggctagtccgttatcaacttgaaaaagtggcaccgagtcggtgctgcccagagtgaggattgcagaatttgttgactgagccatggaggtttt

SEQ ID NO: 5532 - RNA, 145 nt, synthetic construct
  source 1..145: mol_type = other RNA; note = pegRNA
gtgtaacctccatggctcaggttttagagctagaaatagcaagttaaaataaggctagtccgttatcaacttgaaaaagtggcaccgagtcggtgctgcccagagtgaggattgcagaatttgtttactgagccatggaggttac

SEQ ID NO: 5533 - RNA, 145 nt, synthetic construct
  source 1..145: mol_type = other RNA; note = pegRNA
gtgtaacctccatggctcaggttttagagctagaaatagcaagttaaaataaggctagtccgttatcaacttgaaaaagtggcaccgagtcggtgctgcccagagtgaggattgcagaatttgtttactgagccatggaggtttt

SEQ ID NO: 5534 - RNA, 146 nt, synthetic construct
  source 1..146: mol_type = other RNA; note = pegRNA
gtgtaacctccatggctcaggttttagagctagaaatagcaagttaaaataaggctagtccgttatcaacttgaaaaagtggcaccgagtcggtgcacactgcccagagtgaggattgcagaatttgttaactgagccatggaggt

SEQ ID NO: 5535 - RNA, 146 nt, synthetic construct
  source 1..146: mol_type = other RNA; note = pegRNA
gtgtaacctccatggctcaggttttagagctagaaatagcaagttaaaataaggctagtccgttatcaacttgaaaaagtggcaccgagtcggtgcacactgcccagagtgaggattgcagaatttgttaactgagccatggtttt

SEQ ID NO: 5536 - RNA, 146 nt, synthetic construct
  source 1..146: mol_type = other RNA; note = pegRNA
gtgtaacctccatggctcaggttttagagctagaaatagcaagttaaaataaggctagtccgttatcaacttgaaaaagtggcaccgagtcggtgcacactgcccagagtgaggattgcagaatttgttgactgagccatggaggt

SEQ ID NO: 5537 - RNA, 146 nt, synthetic construct
  source 1..146: mol_type = other RNA; note = pegRNA
gtgtaacctccatggctcaggttttagagctagaaatagcaagttaaaataaggctagtccgttatcaacttgaaaaagtggcaccgagtcggtgcacactgcccagagtgaggattgcagaatttgttgactgagccatggtttt

SEQ ID NO: 5538 - RNA, 146 nt, synthetic construct
  source 1..146: mol_type = other RNA; note = pegRNA
gtgtaacctccatggctcaggttttagagctagaaatagcaagttaaaataaggctagtccgttatcaacttgaaaaagtggcaccgagtcggtgcacactgcccagagtgaggattgcagaatttgtttactgagccatggaggt

SEQ ID NO: 5539 - RNA, 146 nt, synthetic construct
  source 1..146: mol_type = other RNA; note = pegRNA
gtgtaacctccatggctcaggttttagagctagaaatagcaagttaaaataaggctagtccgttatcaacttgaaaaagtggcaccgagtcggtgcacactgcccagagtgaggattgcagaatttgtttactgagccatggtttt

SEQ ID NO: 5540 - RNA, 146 nt, synthetic construct
  source 1..146: mol_type = other RNA; note = pegRNA
gtgtaacctccatggctcaggttttagagctagaaatagcaagttaaaataaggctagtccgttatcaacttgaaaaagtggcaccgagtcggtgcactgcccagagtgaggattgcagaatttgttaactgagccatggaggtta

SEQ ID NO: 5541 - RNA, 146 nt, synthetic construct
  source 1..146: mol_type = other RNA; note = pegRNA
gtgtaacctccatggctcaggttttagagctagaaatagcaagttaaaataaggctagtccgttatcaacttgaaaaagtggcaccgagtcggtgcactgcccagagtgaggattgcagaatttgttaactgagccatggagtttt

SEQ ID NO: 5542 - RNA, 146 nt, synthetic construct
  source 1..146: mol_type = other RNA; note = pegRNA
gtgtaacctccatggctcaggttttagagctagaaatagcaagttaaaataaggctagtccgttatcaacttgaaaaagtggcaccgagtcggtgcactgcccagagtgaggattgcagaatttgttgactgagccatggaggtta

SEQ ID NO: 5543 - RNA, 146 nt, synthetic construct
  source 1..146: mol_type = other RNA; note = pegRNA
gtgtaacctccatggctcaggttttagagctagaaatagcaagttaaaataaggctagtccgttatcaacttgaaaaagtggcaccgagtcggtgcactgcccagagtgaggattgcagaatttgttgactgagccatggagtttt

SEQ ID NO: 5544 - RNA, 146 nt, synthetic construct
  source 1..146: mol_type = other RNA; note = pegRNA
gtgtaacctccatggctcaggttttagagctagaaatagcaagttaaaataaggctagtccgttatcaacttgaaaaagtggcaccgagtcggtgcactgcccagagtgaggattgcagaatttgtttactgagccatggaggtta

SEQ ID NO: 5545 - RNA, 146 nt, synthetic construct
  source 1..146: mol_type = other RNA; note = pegRNA
gtgtaacctccatggctcaggttttagagctagaaatagcaagttaaaataaggctagtccgttatcaacttgaaaaagtggcaccgagtcggtgcactgcccagagtgaggattgcagaatttgtttactgagccatggagtttt

SEQ ID NO: 5546 - RNA, 146 nt, synthetic construct
  source 1..146: mol_type = other RNA; note = pegRNA
gtgtaacctccatggctcaggttttagagctagaaatagcaagttaaaataaggctagtccgttatcaacttgaaaaagtggcaccgagtcggtgccacactgcccagagtgaggattgcagaatttgttaactgagccatggagg

SEQ ID NO: 5547 - RNA, 146 nt, synthetic construct
  source 1..146: mol_type = other RNA; note = pegRNA
gtgtaacctccatggctcaggttttagagctagaaatagcaagttaaaataaggctagtccgttatcaacttgaaaaagtggcaccgagtcggtgccacactgcccagagtgaggattgcagaatttgttgactgagccatggagg

SEQ ID NO: 5548 - RNA, 146 nt, synthetic construct
  source 1..146: mol_type = other RNA; note = pegRNA
gtgtaacctccatggctcaggttttagagctagaaatagcaagttaaaataaggctagtccgttatcaacttgaaaaagtggcaccgagtcggtgccacactgcccagagtgaggattgcagaatttgtttactgagccatggagg

SEQ ID NO: 5549 - RNA, 146 nt, synthetic construct
  source 1..146: mol_type = other RNA; note = pegRNA
gtgtaacctccatggctcaggttttagagctagaaatagcaagttaaaataaggctagtccgttatcaacttgaaaaagtggcaccgagtcggtgccactgcccagagtgaggattgcagaatttgttaactgagccatggaggtt

SEQ ID NO: 5550 - RNA, 146 nt, synthetic construct
  source 1..146: mol_type = other RNA; note = pegRNA
gtgtaacctccatggctcaggttttagagctagaaatagcaagttaaaataaggctagtccgttatcaacttgaaaaagtggcaccgagtcggtgccactgcccagagtgaggattgcagaatttgttaactgagccatggatttt

SEQ ID NO: 5551 - RNA, 146 nt, synthetic construct
  source 1..146: mol_type = other RNA; note = pegRNA
gtgtaacctccatggctcaggttttagagctagaaatagcaagttaaaataaggctagtccgttatcaacttgaaaaagtggcaccgagtcggtgccactgcccagagtgaggattgcagaatttgttgactgagccatggaggtt

SEQ ID NO: 5552 - RNA, 146 nt, synthetic construct
  source 1..146: mol_type = other RNA; note = pegRNA
gtgtaacctccatggctcaggttttagagctagaaatagcaagttaaaataaggctagtccgttatcaacttgaaaaagtggcaccgagtcggtgccactgcccagagtgaggattgcagaatttgttgactgagccatggatttt

SEQ ID NO: 5553 - RNA, 146 nt, synthetic construct
  source 1..146: mol_type = other RNA; note = pegRNA
gtgtaacctccatggctcaggttttagagctagaaatagcaagttaaaataaggctagtccgttatcaacttgaaaaagtggcaccgagtcggtgccactgcccagagtgaggattgcagaatttgtttactgagccatggaggtt

SEQ ID NO: 5554 - RNA, 146 nt, synthetic construct
  source 1..146: mol_type = other RNA; note = pegRNA
gtgtaacctccatggctcaggttttagagctagaaatagcaagttaaaataaggctagtccgttatcaacttgaaaaagtggcaccgagtcggtgccactgcccagagtgaggattgcagaatttgtttactgagccatggatttt

SEQ ID NO: 5555 - RNA, 146 nt, synthetic construct
  source 1..146: mol_type = other RNA; note = pegRNA
gtgtaacctccatggctcaggttttagagctagaaatagcaagttaaaataaggctagtccgttatcaacttgaaaaagtggcaccgagtcggtgccagagtgaggattgcagaatttgttaactgagccatggaggttacatttt

SEQ ID NO: 5556 - RNA, 146 nt, synthetic construct
  source 1..146: mol_type = other RNA; note = pegRNA
gtgtaacctccatggctcaggttttagagctagaaatagcaagttaaaataaggctagtccgttatcaacttgaaaaagtggcaccgagtcggtgccagagtgaggattgcagaatttgttgactgagccatggaggttacatttt

SEQ ID NO: 5557 - RNA, 146 nt, synthetic construct
  source 1..146: mol_type = other RNA; note = pegRNA
gtgtaacctccatggctcaggttttagagctagaaatagcaagttaaaataaggctagtccgttatcaacttgaaaaagtggcaccgagtcggtgccagagtgaggattgcagaatttgtttactgagccatggaggttacatttt

SEQ ID NO: 5558 - RNA, 146 nt, synthetic construct
  source 1..146: mol_type = other RNA; note = pegRNA
gtgtaacctccatggctcaggttttagagctagaaatagcaagttaaaataaggctagtccgttatcaacttgaaaaagtggcaccgagtcggtgcccagagtgaggattgcagaatttgttaactgagccatggaggttactttt

SEQ ID NO: 5559 - RNA, 146 nt, synthetic construct
  source 1..146: mol_type = other RNA; note = pegRNA
gtgtaacctccatggctcaggttttagagctagaaatagcaagttaaaataaggctagtccgttatcaacttgaaaaagtggcaccgagtcggtgcccagagtgaggattgcagaatttgttgactgagccatggaggttactttt

SEQ ID NO: 5560 - RNA, 146 nt, synthetic construct
  source 1..146: mol_type = other RNA; note = pegRNA
gtgtaacctccatggctcaggttttagagctagaaatagcaagttaaaataaggctagtccgttatcaacttgaaaaagtggcaccgagtcggtgcccagagtgaggattgcagaatttgtttactgagccatggaggttactttt

SEQ ID NO: 5561 - RNA, 146 nt, synthetic construct
  source 1..146: mol_type = other RNA; note = pegRNA
gtgtaacctccatggctcaggttttagagctagaaatagcaagttaaaataaggctagtccgttatcaacttgaaaaagtggcaccgagtcggtgccccagagtgaggattgcagaatttgttaactgagccatggaggttatttt

SEQ ID NO: 5562 - RNA, 146 nt, synthetic construct
  source 1..146: mol_type = other RNA; note = pegRNA
gtgtaacctccatggctcaggttttagagctagaaatagcaagttaaaataaggctagtccgttatcaacttgaaaaagtggcaccgagtcggtgccccagagtgaggattgcagaatttgttgactgagccatggaggttatttt

SEQ ID NO: 5563 - RNA, 146 nt, synthetic construct
  source 1..146: mol_type = other RNA; note = pegRNA
gtgtaacctccatggctcaggttttagagctagaaatagcaagttaaaataaggctagtccgttatcaacttgaaaaagtggcaccgagtcggtgccccagagtgaggattgcagaatttgtttactgagccatggaggttatttt

SEQ ID NO: 5564 - RNA, 146 nt, synthetic construct
  source 1..146: mol_type = other RNA; note = pegRNA
gtgtaacctccatggctcaggttttagagctagaaatagcaagttaaaataaggctagtccgttatcaacttgaaaaagtggcaccgagtcggtgcctgcccagagtgaggattgcagaatttgttaactgagccatggaggttac

SEQ ID NO: 5565 - RNA, 146 nt, synthetic construct
  source 1..146: mol_type = other RNA; note = pegRNA
gtgtaacctccatggctcaggttttagagctagaaatagcaagttaaaataaggctagtccgttatcaacttgaaaaagtggcaccgagtcggtgcctgcccagagtgaggattgcagaatttgttaactgagccatggaggtttt

SEQ ID NO: 5566 - RNA, 146 nt, synthetic construct
  source 1..146: mol_type = other RNA; note = pegRNA
gtgtaacctccatggctcaggttttagagctagaaatagcaagttaaaataaggctagtccgttatcaacttgaaaaagtggcaccgagtcggtgcctgcccagagtgaggattgcagaatttgttgactgagccatggaggttac

SEQ ID NO: 5567 - RNA, 146 nt, synthetic construct
  source 1..146: mol_type = other RNA; note = pegRNA
gtgtaacctccatggctcaggttttagagctagaaatagcaagttaaaataaggctagtccgttatcaacttgaaaaagtggcaccgagtcggtgcctgcccagagtgaggattgcagaatttgttgactgagccatggaggtttt

SEQ ID NO: 5568 - RNA, 146 nt, synthetic construct
  source 1..146: mol_type = other RNA; note = pegRNA
gtgtaacctccatggctcaggttttagagctagaaatagcaagttaaaataaggctagtccgttatcaacttgaaaaagtggcaccgagtcggtgcctgcccagagtgaggattgcagaatttgtttactgagccatggaggttac

SEQ ID NO: 5569 - RNA, 146 nt, synthetic construct
  source 1..146: mol_type = other RNA; note = pegRNA
gtgtaacctccatggctcaggttttagagctagaaatagcaagttaaaataaggctagtccgttatcaacttgaaaaagtggcaccgagtcggtgcctgcccagagtgaggattgcagaatttgtttactgagccatggaggtttt

SEQ ID NO: 5570 - RNA, 146 nt, synthetic construct
  source 1..146: mol_type = other RNA; note = pegRNA
gtgtaacctccatggctcaggttttagagctagaaatagcaagttaaaataaggctagtccgttatcaacttgaaaaagtggcaccgagtcggtgcgcccagagtgaggattgcagaatttgttaactgagccatggaggtttttt

SEQ ID NO: 5571 - RNA, 146 nt, synthetic construct
  source 1..146: mol_type = other RNA; note = pegRNA
gtgtaacctccatggctcaggttttagagctagaaatagcaagttaaaataaggctagtccgttatcaacttgaaaaagtggcaccgagtcggtgcgcccagagtgaggattgcagaatttgttgactgagccatggaggtttttt

SEQ ID NO: 5572 - RNA, 146 nt, synthetic construct
  source 1..146: mol_type = other RNA; note = pegRNA
gtgtaacctccatggctcaggttttagagctagaaatagcaagttaaaataaggctagtccgttatcaacttgaaaaagtggcaccgagtcggtgcgcccagagtgaggattgcagaatttgtttactgagccatggaggtttttt

SEQ ID NO: 5573 - RNA, 146 nt, synthetic construct
  source 1..146: mol_type = other RNA; note = pegRNA
gtgtaacctccatggctcaggttttagagctagaaatagcaagttaaaataaggctagtccgttatcaacttgaaaaagtggcaccgagtcggtgctcacactgcccagagtgaggattgcagaatttgttaactgagccatggag

SEQ ID NO: 5574 - RNA, 146 nt, synthetic construct
  source 1..146: mol_type = other RNA; note = pegRNA
gtgtaacctccatggctcaggttttagagctagaaatagcaagttaaaataaggctagtccgttatcaacttgaaaaagtggcaccgagtcggtgctcacactgcccagagtgaggattgcagaatttgttgactgagccatggag

SEQ ID NO: 5575 - RNA, 146 nt, synthetic construct
  source 1..146: mol_type = other RNA; note = pegRNA
gtgtaacctccatggctcaggttttagagctagaaatagcaagttaaaataaggctagtccgttatcaacttgaaaaagtggcaccgagtcggtgctcacactgcccagagtgaggattgcagaatttgtttactgagccatggag

SEQ ID NO: 5576 - RNA, 146 nt, synthetic construct
  source 1..146: mol_type = other RNA; note = pegRNA
gtgtaacctccatggctcaggttttagagctagaaatagcaagttaaaataaggctagtccgttatcaacttgaaaaagtggcaccgagtcggtgctgcccagagtgaggattgcagaatttgttaactgagccatggaggttaca

SEQ ID NO: 5577 - RNA, 146 nt, synthetic construct
  source 1..146: mol_type = other RNA; note = pegRNA
gtgtaacctccatggctcaggttttagagctagaaatagcaagttaaaataaggctagtccgttatcaacttgaaaaagtggcaccgagtcggtgctgcccagagtgaggattgcagaatttgttaactgagccatggaggttttt

SEQ ID NO: 5578 - RNA, 146 nt, synthetic construct
  source 1..146: mol_type = other RNA; note = pegRNA
gtgtaacctccatggctcaggttttagagctagaaatagcaagttaaaataaggctagtccgttatcaacttgaaaaagtggcaccgagtcggtgctgcccagagtgaggattgcagaatttgttgactgagccatggaggttaca

SEQ ID NO: 5579 - RNA, 146 nt, synthetic construct
  source 1..146: mol_type = other RNA; note = pegRNA
gtgtaacctccatggctcaggttttagagctagaaatagcaagttaaaataaggctagtccgttatcaacttgaaaaagtggcaccgagtcggtgctgcccagagtgaggattgcagaatttgttgactgagccatggaggttttt

SEQ ID NO: 5580 - RNA, 146 nt, synthetic construct
  source 1..146: mol_type = other RNA; note = pegRNA
gtgtaacctccatggctcaggttttagagctagaaatagcaagttaaaataaggctagtccgttatcaacttgaaaaagtggcaccgagtcggtgctgcccagagtgaggattgcagaatttgtttactgagccatggaggttaca

SEQ ID NO: 5581 - RNA, 146 nt, synthetic construct
  source 1..146: mol_type = other RNA; note = pegRNA
gtgtaacctccatggctcaggttttagagctagaaatagcaagttaaaataaggctagtccgttatcaacttgaaaaagtggcaccgagtcggtgctgcccagagtgaggattgcagaatttgtttactgagccatggaggttttt

SEQ ID NO: 5582 - RNA, 147 nt, synthetic construct
  source 1..147: mol_type = other RNA; note = pegRNA
gtgtaacctccatggctcaggttttagagctagaaatagcaagttaaaataaggctagtccgttatcaacttgaaaaagtggcaccgagtcggtgcacactgcccagagtgaggattgcagaatttgttaactgagccatggaggtt

SEQ ID NO: 5583 - RNA, 147 nt, synthetic construct
  source 1..147: mol_type = other RNA; note = pegRNA
gtgtaacctccatggctcaggttttagagctagaaatagcaagttaaaataaggctagtccgttatcaacttgaaaaagtggcaccgagtcggtgcacactgcccagagtgaggattgcagaatttgttaactgagccatggatttt

SEQ ID NO: 5584 - RNA, 147 nt, synthetic construct
  source 1..147: mol_type = other RNA; note = pegRNA
gtgtaacctccatggctcaggttttagagctagaaatagcaagttaaaataaggctagtccgttatcaacttgaaaaagtggcaccgagtcggtgcacactgcccagagtgaggattgcagaatttgttgactgagccatggaggtt

SEQ ID NO: 5585 - RNA, 147 nt, synthetic construct
  source 1..147: mol_type = other RNA; note = pegRNA
gtgtaacctccatggctcaggttttagagctagaaatagcaagttaaaataaggctagtccgttatcaacttgaaaaagtggcaccgagtcggtgcacactgcccagagtgaggattgcagaatttgttgactgagccatggatttt

SEQ ID NO: 5586 - RNA, 147 nt, synthetic construct
  source 1..147: mol_type = other RNA; note = pegRNA
gtgtaacctccatggctcaggttttagagctagaaatagcaagttaaaataaggctagtccgttatcaacttgaaaaagtggcaccgagtcggtgcacactgcccagagtgaggattgcagaatttgtttactgagccatggaggtt

SEQ ID NO: 5587 - RNA, 147 nt, synthetic construct
  source 1..147: mol_type = other RNA; note = pegRNA
gtgtaacctccatggctcaggttttagagctagaaatagcaagttaaaataaggctagtccgttatcaacttgaaaaagtggcaccgagtcggtgcacactgcccagagtgaggattgcagaatttgtttactgagccatggatttt

SEQ ID NO: 5588 - RNA, 147 nt, synthetic construct
  source 1..147: mol_type = other RNA; note = pegRNA
gtgtaacctccatggctcaggttttagagctagaaatagcaagttaaaataaggctagtccgttatcaacttgaaaaagtggcaccgagtcggtgcactgcccagagtgaggattgcagaatttgttaactgagccatggaggttac

SEQ ID NO: 5589 - RNA, 147 nt, synthetic construct
  source 1..147: mol_type = other RNA; note = pegRNA
gtgtaacctccatggctcaggttttagagctagaaatagcaagttaaaataaggctagtccgttatcaacttgaaaaagtggcaccgagtcggtgcactgcccagagtgaggattgcagaatttgttaactgagccatggaggtttt

SEQ ID NO: 5590 - RNA, 147 nt, synthetic construct
  source 1..147: mol_type = other RNA; note = pegRNA
gtgtaacctccatggctcaggttttagagctagaaatagcaagttaaaataaggctagtccgttatcaacttgaaaaagtggcaccgagtcggtgcactgcccagagtgaggattgcagaatttgttgactgagccatggaggttac

SEQ ID NO: 5591 - RNA, 147 nt, synthetic construct
  source 1..147: mol_type = other RNA; note = pegRNA
gtgtaacctccatggctcaggttttagagctagaaatagcaagttaaaataaggctagtccgttatcaacttgaaaaagtggcaccgagtcggtgcactgcccagagtgaggattgcagaatttgttgactgagccatggaggtttt

SEQ ID NO: 5592 - RNA, 147 nt, synthetic construct
  source 1..147: mol_type = other RNA; note = pegRNA
gtgtaacctccatggctcaggttttagagctagaaatagcaagttaaaataaggctagtccgttatcaacttgaaaaagtggcaccgagtcggtgcactgcccagagtgaggattgcagaatttgtttactgagccatggaggttac

SEQ ID NO: 5593 - RNA, 147 nt, synthetic construct
  source 1..147: mol_type = other RNA; note = pegRNA
gtgtaacctccatggctcaggttttagagctagaaatagcaagttaaaataaggctagtccgttatcaacttgaaaaagtggcaccgagtcggtgcactgcccagagtgaggattgcagaatttgtttactgagccatggaggtttt

SEQ ID NO: 5594 - RNA, 147 nt, synthetic construct
  source 1..147: mol_type = other RNA; note = pegRNA
gtgtaacctccatggctcaggttttagagctagaaatagcaagttaaaataaggctagtccgttatcaacttgaaaaagtggcaccgagtcggtgccacactgcccagagtgaggattgcagaatttgttaactgagccatggaggt

SEQ ID NO: 5595 - RNA, 147 nt, synthetic construct
  source 1..147: mol_type = other RNA; note = pegRNA
gtgtaacctccatggctcaggttttagagctagaaatagcaagttaaaataaggctagtccgttatcaacttgaaaaagtggcaccgagtcggtgccacactgcccagagtgaggattgcagaatttgttaactgagccatggtttt

SEQ ID NO: 5596 - RNA, 147 nt, synthetic construct
  source 1..147: mol_type = other RNA; note = pegRNA
gtgtaacctccatggctcaggttttagagctagaaatagcaagttaaaataaggctagtccgttatcaacttgaaaaagtggcaccgagtcggtgccacactgcccagagtgaggattgcagaatttgttgactgagccatggaggt

SEQ ID NO: 5597 - RNA, 147 nt, synthetic construct
  source 1..147: mol_type = other RNA; note = pegRNA
gtgtaacctccatggctcaggttttagagctagaaatagcaagttaaaataaggctagtccgttatcaacttgaaaaagtggcaccgagtcggtgccacactgcccagagtgaggattgcagaatttgttgactgagccatggtttt

SEQ ID NO: 5598 - RNA, 147 nt, synthetic construct
  source 1..147: mol_type = other RNA; note = pegRNA
gtgtaacctccatggctcaggttttagagctagaaatagcaagttaaaataaggctagtccgttatcaacttgaaaaagtggcaccgagtcggtgccacactgcccagagtgaggattgcagaatttgtttactgagccatggaggt

SEQ ID NO: 5599 - RNA, 147 nt, synthetic construct
  source 1..147: mol_type = other RNA; note = pegRNA
gtgtaacctccatggctcaggttttagagctagaaatagcaagttaaaataaggctagtccgttatcaacttgaaaaagtggcaccgagtcggtgccacactgcccagagtgaggattgcagaatttgtttactgagccatggtttt

SEQ ID NO: 5600 - RNA, 147 nt, synthetic construct
  source 1..147: mol_type = other RNA; note = pegRNA
gtgtaacctccatggctcaggttttagagctagaaatagcaagttaaaataaggctagtccgttatcaacttgaaaaagtggcaccgagtcggtgccactgcccagagtgaggattgcagaatttgttaactgagccatggaggtta

SEQ ID NO: 5601 - RNA, 147 nt, synthetic construct
  source 1..147: mol_type = other RNA; note = pegRNA
gtgtaacctccatggctcaggttttagagctagaaatagcaagttaaaataaggctagtccgttatcaacttgaaaaagtggcaccgagtcggtgccactgcccagagtgaggattgcagaatttgttaactgagccatggagtttt

SEQ ID NO: 5602 - RNA, 147 nt, synthetic construct
  source 1..147: mol_type = other RNA; note = pegRNA
gtgtaacctccatggctcaggttttagagctagaaatagcaagttaaaataaggctagtccgttatcaacttgaaaaagtggcaccgagtcggtgccactgcccagagtgaggattgcagaatttgttgactgagccatggaggtta

SEQ ID NO: 5603 - RNA, 147 nt, synthetic construct
  source 1..147: mol_type = other RNA; note = pegRNA
gtgtaacctccatggctcaggttttagagctagaaatagcaagttaaaataaggctagtccgttatcaacttgaaaaagtggcaccgagtcggtgccactgcccagagtgaggattgcagaatttgttgactgagccatggagtttt

SEQ ID NO: 5604 - RNA, 147 nt, synthetic construct
  source 1..147: mol_type = other RNA; note = pegRNA
gtgtaacctccatggctcaggttttagagctagaaatagcaagttaaaataaggctagtccgttatcaacttgaaaaagtggcaccgagtcggtgccactgcccagagtgaggattgcagaatttgtttactgagccatggaggtta

SEQ ID NO: 5605 - RNA, 147 nt, synthetic construct
  source 1..147: mol_type = other RNA; note = pegRNA
gtgtaacctccatggctcaggttttagagctagaaatagcaagttaaaataaggctagtccgttatcaacttgaaaaagtggcaccgagtcggtgccactgcccagagtgaggattgcagaatttgtttactgagccatggagtttt

SEQ ID NO: 5606 - RNA, 147 nt, synthetic construct
  source 1..147: mol_type = other RNA; note = pegRNA
gtgtaacctccatggctcaggttttagagctagaaatagcaagttaaaataaggctagtccgttatcaacttgaaaaagtggcaccgagtcggtgcccagagtgaggattgcagaatttgttaactgagccatggaggttacatttt

SEQ ID NO: 5607 - RNA, 147 nt, synthetic construct
  source 1..147: mol_type = other RNA; note = pegRNA
gtgtaacctccatggctcaggttttagagctagaaatagcaagttaaaataaggctagtccgttatcaacttgaaaaagtggcaccgagtcggtgcccagagtgaggattgcagaatttgttgactgagccatggaggttacatttt

SEQ ID NO: 5608 - RNA, 147 nt, synthetic construct
  source 1..147: mol_type = other RNA; note = pegRNA
gtgtaacctccatggctcaggttttagagctagaaatagcaagttaaaataaggctagtccgttatcaacttgaaaaagtggcaccgagtcggtgcccagagtgaggattgcagaatttgtttactgagccatggaggttacatttt

SEQ ID NO: 5609 - RNA, 147 nt, synthetic construct
  source 1..147: mol_type = other RNA; note = pegRNA
gtgtaacctccatggctcaggttttagagctagaaatagcaagttaaaataaggctagtccgttatcaacttgaaaaagtggcaccgagtcggtgccccagagtgaggattgcagaatttgttaactgagccatggaggttactttt

SEQ ID NO: 5610 - RNA, 147 nt, synthetic construct
  source 1..147: mol_type = other RNA; note = pegRNA
gtgtaacctccatggctcaggttttagagctagaaatagcaagttaaaataaggctagtccgttatcaacttgaaaaagtggcaccgagtcggtgccccagagtgaggattgcagaatttgttgactgagccatggaggttactttt

SEQ ID NO: 5611 - RNA, 147 nt, synthetic construct
  source 1..147: mol_type = other RNA; note = pegRNA
gtgtaacctccatggctcaggttttagagctagaaatagcaagttaaaataaggctagtccgttatcaacttgaaaaagtggcaccgagtcggtgccccagagtgaggattgcagaatttgtttactgagccatggaggttactttt

SEQ ID NO: 5612 - RNA, 147 nt, synthetic construct
  source 1..147: mol_type = other RNA; note = pegRNA
gtgtaacctccatggctcaggttttagagctagaaatagcaagttaaaataaggctagtccgttatcaacttgaaaaagtggcaccgagtcggtgcctgcccagagtgaggattgcagaatttgttaactgagccatggaggttaca

SEQ ID NO: 5613 - RNA, 147 nt, synthetic construct
  source 1..147: mol_type = other RNA; note = pegRNA
gtgtaacctccatggctcaggttttagagctagaaatagcaagttaaaataaggctagtccgttatcaacttgaaaaagtggcaccgagtcggtgcctgcccagagtgaggattgcagaatttgttaactgagccatggaggttttt

SEQ ID NO: 5614 - RNA, 147 nt, synthetic construct
  source 1..147: mol_type = other RNA; note = pegRNA
gtgtaacctccatggctcaggttttagagctagaaatagcaagttaaaataaggctagtccgttatcaacttgaaaaagtggcaccgagtcggtgcctgcccagagtgaggattgcagaatttgttgactgagccatggaggttaca

SEQ ID NO: 5615 - RNA, 147 nt, synthetic construct
  source 1..147: mol_type = other RNA; note = pegRNA
gtgtaacctccatggctcaggttttagagctagaaatagcaagttaaaataaggctagtccgttatcaacttgaaaaagtggcaccgagtcggtgcctgcccagagtgaggattgcagaatttgttgactgagccatggaggttttt

SEQ ID NO: 5616 - RNA, 147 nt, synthetic construct
  source 1..147: mol_type = other RNA; note = pegRNA
gtgtaacctccatggctcaggttttagagctagaaatagcaagttaaaataaggctagtccgttatcaacttgaaaaagtggcaccgagtcggtgcctgcccagagtgaggattgcagaatttgtttactgagccatggaggttaca

SEQ ID NO: 5617 - RNA, 147 nt, synthetic construct
  source 1..147: mol_type = other RNA; note = pegRNA
gtgtaacctccatggctcaggttttagagctagaaatagcaagttaaaataaggctagtccgttatcaacttgaaaaagtggcaccgagtcggtgcctgcccagagtgaggattgcagaatttgtttactgagccatggaggttttt

SEQ ID NO: 5618 - RNA, 147 nt, synthetic construct
  source 1..147: mol_type = other RNA; note = pegRNA
gtgtaacctccatggctcaggttttagagctagaaatagcaagttaaaataaggctagtccgttatcaacttgaaaaagtggcaccgagtcggtgcgcccagagtgaggattgcagaatttgttaactgagccatggaggttatttt

SEQ ID NO: 5619 - RNA, 147 nt, synthetic construct
  source 1..147: mol_type = other RNA; note = pegRNA
gtgtaacctccatggctcaggttttagagctagaaatagcaagttaaaataaggctagtccgttatcaacttgaaaaagtggcaccgagtcggtgcgcccagagtgaggattgcagaatttgttgactgagccatggaggttatttt

SEQ ID NO: 5620 - RNA, 147 nt, synthetic construct
  source 1..147: mol_type = other RNA; note = pegRNA
gtgtaacctccatggctcaggttttagagctagaaatagcaagttaaaataaggctagtccgttatcaacttgaaaaagtggcaccgagtcggtgcgcccagagtgaggattgcagaatttgtttactgagccatggaggttatttt

SEQ ID NO: 5621 - RNA, 147 nt, synthetic construct
  source 1..147: mol_type = other RNA; note = pegRNA
gtgtaacctccatggctcaggttttagagctagaaatagcaagttaaaataaggctagtccgttatcaacttgaaaaagtggcaccgagtcggtgctcacactgcccagagtgaggattgcagaatttgttaactgagccatggagg

SEQ ID NO: 5622 - RNA, 147 nt, synthetic construct
  source 1..147: mol_type = other RNA; note = pegRNA
gtgtaacctccatggctcaggttttagagctagaaatagcaagttaaaataaggctagtccgttatcaacttgaaaaagtggcaccgagtcggtgctcacactgcccagagtgaggattgcagaatttgttgactgagccatggagg

SEQ ID NO: 5623 - RNA, 147 nt, synthetic construct
  source 1..147: mol_type = other RNA; note = pegRNA
gtgtaacctccatggctcaggttttagagctagaaatagcaagttaaaataaggctagtccgttatcaacttgaaaaagtggcaccgagtcggtgctcacactgcccagagtgaggattgcagaatttgtttactgagccatggagg

SEQ ID NO: 5624 - RNA, 147 nt, synthetic construct
  source 1..147: mol_type = other RNA; note = pegRNA
gtgtaacctccatggctcaggttttagagctagaaatagcaagttaaaataaggctagtccgttatcaacttgaaaaagtggcaccgagtcggtgctgcccagagtgaggattgcagaatttgttaactgagccatggaggtttttt

SEQ ID NO: 5625 - RNA, 147 nt, synthetic construct
  source 1..147: mol_type = other RNA; note = pegRNA
gtgtaacctccatggctcaggttttagagctagaaatagcaagttaaaataaggctagtccgttatcaacttgaaaaagtggcaccgagtcggtgctgcccagagtgaggattgcagaatttgttgactgagccatggaggtttttt

SEQ ID NO: 5626 - RNA, 147 nt, synthetic construct
  source 1..147: mol_type = other RNA; note = pegRNA
gtgtaacctccatggctcaggttttagagctagaaatagcaagttaaaataaggctagtccgttatcaacttgaaaaagtggcaccgagtcggtgctgcccagagtgaggattgcagaatttgtttactgagccatggaggtttttt

SEQ ID NO: 5627 - RNA, 148 nt, synthetic construct
  source 1..148: mol_type = other RNA; note = pegRNA
gtgtaacctccatggctcaggttttagagctagaaatagcaagttaaaataaggctagtccgttatcaacttgaaaaagtggcaccgagtcggtgcacactgcccagagtgaggattgcagaatttgttaactgagccatggaggtta

SEQ ID NO: 5628 - RNA, 148 nt, synthetic construct
  source 1..148: mol_type = other RNA; note = pegRNA
gtgtaacctccatggctcaggttttagagctagaaatagcaagttaaaataaggctagtccgttatcaacttgaaaaagtggcaccgagtcggtgcacactgcccagagtgaggattgcagaatttgttaactgagccatggagtttt

SEQ ID NO: 5629 - RNA, 148 nt, synthetic construct
  source 1..148: mol_type = other RNA; note = pegRNA
gtgtaacctccatggctcaggttttagagctagaaatagcaagttaaaataaggctagtccgttatcaacttgaaaaagtggcaccgagtcggtgcacactgcccagagtgaggattgcagaatttgttgactgagccatggaggtta

SEQ ID NO: 5630 - RNA, 148 nt, synthetic construct
  source 1..148: mol_type = other RNA; note = pegRNA
gtgtaacctccatggctcaggttttagagctagaaatagcaagttaaaataaggctagtccgttatcaacttgaaaaagtggcaccgagtcggtgcacactgcccagagtgaggattgcagaatttgttgactgagccatggagtttt

SEQ ID NO: 5631 - RNA, 148 nt, synthetic construct
  source 1..148: mol_type = other RNA; note = pegRNA
gtgtaacctccatggctcaggttttagagctagaaatagcaagttaaaataaggctagtccgttatcaacttgaaaaagtggcaccgagtcggtgcacactgcccagagtgaggattgcagaatttgtttactgagccatggaggtta

SEQ ID NO: 5632 - RNA, 148 nt, synthetic construct
  source 1..148: mol_type = other RNA; note = pegRNA
gtgtaacctccatggctcaggttttagagctagaaatagcaagttaaaataaggctagtccgttatcaacttgaaaaagtggcaccgagtcggtgcacactgcccagagtgaggattgcagaatttgtttactgagccatggagtttt

SEQ ID NO: 5633 - RNA, 148 nt, synthetic construct
  source 1..148: mol_type = other RNA; note = pegRNA
gtgtaacctccatggctcaggttttagagctagaaatagcaagttaaaataaggctagtccgttatcaacttgaaaaagtggcaccgagtcggtgcactgcccagagtgaggattgcagaatttgttaactgagccatggaggttaca

SEQ ID NO: 5634 - RNA, 148 nt, synthetic construct
  source 1..148: mol_type = other RNA; note = pegRNA
gtgtaacctccatggctcaggttttagagctagaaatagcaagttaaaataaggctagtccgttatcaacttgaaaaagtggcaccgagtcggtgcactgcccagagtgaggattgcagaatttgttaactgagccatggaggttttt

SEQ ID NO: 5635 - RNA, 148 nt, synthetic construct
  source 1..148: mol_type = other RNA; note = pegRNA
gtgtaacctccatggctcaggttttagagctagaaatagcaagttaaaataaggctagtccgttatcaacttgaaaaagtggcaccgagtcggtgcactgcccagagtgaggattgcagaatttgttgactgagccatggaggttaca

SEQ ID NO: 5636 - RNA, 148 nt, synthetic construct
  source 1..148: mol_type = other RNA; note = pegRNA
gtgtaacctccatggctcaggttttagagctagaaatagcaagttaaaataaggctagtccgttatcaacttgaaaaagtggcaccgagtcggtgcactgcccagagtgaggattgcagaatttgttgactgagccatggaggttttt

SEQ ID NO: 5637 - RNA, 148 nt, synthetic construct
  source 1..148: mol_type = other RNA; note = pegRNA
gtgtaacctccatggctcaggttttagagctagaaatagcaagttaaaataaggctagtccgttatcaacttgaaaaagtggcaccgagtcggtgcactgcccagagtgaggattgcagaatttgtttactgagccatggaggttaca

SEQ ID NO: 5638 - RNA, 148 nt, synthetic construct
  source 1..148: mol_type = other RNA; note = pegRNA
gtgtaacctccatggctcaggttttagagctagaaatagcaagttaaaataaggctagtccgttatcaacttgaaaaagtggcaccgagtcggtgcactgcccagagtgaggattgcagaatttgtttactgagccatggaggttttt

SEQ ID NO: 5639 - RNA, 148 nt, synthetic construct
  source 1..148: mol_type = other RNA; note = pegRNA
gtgtaacctccatggctcaggttttagagctagaaatagcaagttaaaataaggctagtccgttatcaacttgaaaaagtggcaccgagtcggtgccacactgcccagagtgaggattgcagaatttgttaactgagccatggaggtt

SEQ ID NO: 5640 - RNA, 148 nt, synthetic construct
  source 1..148: mol_type = other RNA; note = pegRNA
gtgtaacctccatggctcaggttttagagctagaaatagcaagttaaaataaggctagtccgttatcaacttgaaaaagtggcaccgagtcggtgccacactgcccagagtgaggattgcagaatttgttaactgagccatggatttt

SEQ ID NO: 5641 - RNA, 148 nt, synthetic construct
  source 1..148: mol_type = other RNA; note = pegRNA
gtgtaacctccatggctcaggttttagagctagaaatagcaagttaaaataaggctagtccgttatcaacttgaaaaagtggcaccgagtcggtgccacactgcccagagtgaggattgcagaatttgttgactgagccatggaggtt

SEQ ID NO: 5642 - RNA, 148 nt, synthetic construct
  source 1..148: mol_type = other RNA; note = pegRNA
gtgtaacctccatggctcaggttttagagctagaaatagcaagttaaaataaggctagtccgttatcaacttgaaaaagtggcaccgagtcggtgccacactgcccagagtgaggattgcagaatttgttgactgagccatggatttt

SEQ ID NO: 5643 - RNA, 148 nt, synthetic construct
  source 1..148: mol_type = other RNA; note = pegRNA
gtgtaacctccatggctcaggttttagagctagaaatagcaagttaaaataaggctagtccgttatcaacttgaaaaagtggcaccgagtcggtgccacactgcccagagtgaggattgcagaatttgtttactgagccatggaggtt

SEQ ID NO: 5644 - RNA, 148 nt, synthetic construct
  source 1..148: mol_type = other RNA; note = pegRNA
gtgtaacctccatggctcaggttttagagctagaaatagcaagttaaaataaggctagtccgttatcaacttgaaaaagtggcaccgagtcggtgccacactgcccagagtgaggattgcagaatttgtttactgagccatggatttt

SEQ ID NO: 5645 - RNA, 148 nt, synthetic construct
  source 1..148: mol_type = other RNA; note = pegRNA
gtgtaacctccatggctcaggttttagagctagaaatagcaagttaaaataaggctagtccgttatcaacttgaaaaagtggcaccgagtcggtgccactgcccagagtgaggattgcagaatttgttaactgagccatggaggttac

SEQ ID NO: 5646 - RNA, 148 nt, synthetic construct
  source 1..148: mol_type = other RNA; note = pegRNA
gtgtaacctccatggctcaggttttagagctagaaatagcaagttaaaataaggctagtccgttatcaacttgaaaaagtggcaccgagtcggtgccactgcccagagtgaggattgcagaatttgttaactgagccatggaggtttt

SEQ ID NO: 5647 - RNA, 148 nt, synthetic construct
  source 1..148: mol_type = other RNA; note = pegRNA
gtgtaacctccatggctcaggttttagagctagaaatagcaagttaaaataaggctagtccgttatcaacttgaaaaagtggcaccgagtcggtgccactgcccagagtgaggattgcagaatttgttgactgagccatggaggttac

SEQ ID NO: 5648 - RNA, 148 nt, synthetic construct
  source 1..148: mol_type = other RNA; note = pegRNA
gtgtaacctccatggctcaggttttagagctagaaatagcaagttaaaataaggctagtccgttatcaacttgaaaaagtggcaccgagtcggtgccactgcccagagtgaggattgcagaatttgttgactgagccatggaggtttt

SEQ ID NO: 5649 - RNA, 148 nt, synthetic construct
  source 1..148: mol_type = other RNA; note = pegRNA
gtgtaacctccatggctcaggttttagagctagaaatagcaagttaaaataaggctagtccgttatcaacttgaaaaagtggcaccgagtcggtgccactgcccagagtgaggattgcagaatttgtttactgagccatggaggttac

SEQ ID NO: 5650 - RNA, 148 nt, synthetic construct
  source 1..148: mol_type = other RNA; note = pegRNA
gtgtaacctccatggctcaggttttagagctagaaatagcaagttaaaataaggctagtccgttatcaacttgaaaaagtggcaccgagtcggtgccactgcccagagtgaggattgcagaatttgtttactgagccatggaggtttt

SEQ ID NO: 5651 - RNA, 148 nt, synthetic construct
  source 1..148: mol_type = other RNA; note = pegRNA
gtgtaacctccatggctcaggttttagagctagaaatagcaagttaaaataaggctagtccgttatcaacttgaaaaagtggcaccgagtcggtgccccagagtgaggattgcagaatttgttaactgagccatggaggttacatttt

SEQ ID NO: 5652 - RNA, 148 nt, synthetic construct
  source 1..148: mol_type = other RNA; note = pegRNA
gtgtaacctccatggctcaggttttagagctagaaatagcaagttaaaataaggctagtccgttatcaacttgaaaaagtggcaccgagtcggtgccccagagtgaggattgcagaatttgttgactgagccatggaggttacatttt

SEQ ID NO: 5653 - RNA, 148 nt, synthetic construct
  source 1..148: mol_type = other RNA; note = pegRNA
gtgtaacctccatggctcaggttttagagctagaaatagcaagttaaaataaggctagtccgttatcaacttgaaaaagtggcaccgagtcggtgccccagagtgaggattgcagaatttgtttactgagccatggaggttacatttt

SEQ ID NO: 5654 - RNA, 148 nt, synthetic construct
  source 1..148: mol_type = other RNA; note = pegRNA
gtgtaacctccatggctcaggttttagagctagaaatagcaagttaaaataaggctagtccgttatcaacttgaaaaagtggcaccgagtcggtgcctgcccagagtgaggattgcagaatttgttaactgagccatggaggtttttt

SEQ ID NO: 5655 - RNA, 148 nt, synthetic construct
  source 1..148: mol_type = other RNA; note = pegRNA
gtgtaacctccatggctcaggttttagagctagaaatagcaagttaaaataaggctagtccgttatcaacttgaaaaagtggcaccgagtcggtgcctgcccagagtgaggattgcagaatttgttgactgagccatggaggtttttt

SEQ ID NO: 5656 - RNA, 148 nt, synthetic construct
  source 1..148: mol_type = other RNA; note = pegRNA
gtgtaacctccatggctcaggttttagagctagaaatagcaagttaaaataaggctagtccgttatcaacttgaaaaagtggcaccgagtcggtgcctgcccagagtgaggattgcagaatttgtttactgagccatggaggtttttt

SEQ ID NO: 5657 - RNA, 148 nt, synthetic construct
  source 1..148: mol_type = other RNA; note = pegRNA
gtgtaacctccatggctcaggttttagagctagaaatagcaagttaaaataaggctagtccgttatcaacttgaaaaagtggcaccgagtcggtgcgcccagagtgaggattgcagaatttgttaactgagccatggaggttactttt

SEQ ID NO: 5658 - RNA, 148 nt, synthetic construct
  source 1..148: mol_type = other RNA; note = pegRNA
gtgtaacctccatggctcaggttttagagctagaaatagcaagttaaaataaggctagtccgttatcaacttgaaaaagtggcaccgagtcggtgcgcccagagtgaggattgcagaatttgttgactgagccatggaggttactttt

SEQ ID NO: 5659 - RNA, 148 nt, synthetic construct
  source 1..148: mol_type = other RNA; note = pegRNA
gtgtaacctccatggctcaggttttagagctagaaatagcaagttaaaataaggctagtccgttatcaacttgaaaaagtggcaccgagtcggtgcgcccagagtgaggattgcagaatttgtttactgagccatggaggttactttt

SEQ ID NO: 5660 - RNA, 148 nt, synthetic construct
  source 1..148: mol_type = other RNA; note = pegRNA
gtgtaacctccatggctcaggttttagagctagaaatagcaagttaaaataaggctagtccgttatcaacttgaaaaagtggcaccgagtcggtgctcacactgcccagagtgaggattgcagaatttgttaactgagccatggaggt

SEQ ID NO: 5661 - RNA, 148 nt, synthetic construct
  source 1..148: mol_type = other RNA; note = pegRNA
gtgtaacctccatggctcaggttttagagctagaaatagcaagttaaaataaggctagtccgttatcaacttgaaaaagtggcaccgagtcggtgctcacactgcccagagtgaggattgcagaatttgttaactgagccatggtttt

SEQ ID NO: 5662 - RNA, 148 nt, synthetic construct
  source 1..148: mol_type = other RNA; note = pegRNA
gtgtaacctccatggctcaggttttagagctagaaatagcaagttaaaataaggctagtccgttatcaacttgaaaaagtggcaccgagtcggtgctcacactgcccagagtgaggattgcagaatttgttgactgagccatggaggt

SEQ ID NO: 5663 - RNA, 148 nt, synthetic construct
  source 1..148: mol_type = other RNA; note = pegRNA
gtgtaacctccatggctcaggttttagagctagaaatagcaagttaaaataaggctagtccgttatcaacttgaaaaagtggcaccgagtcggtgctcacactgcccagagtgaggattgcagaatttgttgactgagccatggtttt

SEQ ID NO: 5664 - RNA, 148 nt, synthetic construct
  source 1..148: mol_type = other RNA; note = pegRNA
gtgtaacctccatggctcaggttttagagctagaaatagcaagttaaaataaggctagtccgttatcaacttgaaaaagtggcaccgagtcggtgctcacactgcccagagtgaggattgcagaatttgtttactgagccatggaggt

SEQ ID NO: 5665 - RNA, 148 nt, synthetic construct
  source 1..148: mol_type = other RNA; note = pegRNA
gtgtaacctccatggctcaggttttagagctagaaatagcaagttaaaataaggctagtccgttatcaacttgaaaaagtggcaccgagtcggtgctcacactgcccagagtgaggattgcagaatttgtttactgagccatggtttt

SEQ ID NO: 5666 - RNA, 148 nt, synthetic construct
  source 1..148: mol_type = other RNA; note = pegRNA
gtgtaacctccatggctcaggttttagagctagaaatagcaagttaaaataaggctagtccgttatcaacttgaaaaagtggcaccgagtcggtgctgcccagagtgaggattgcagaatttgttaactgagccatggaggttatttt

SEQ ID NO: 5667 - RNA, 148 nt, synthetic construct
  source 1..148: mol_type = other RNA; note = pegRNA
gtgtaacctccatggctcaggttttagagctagaaatagcaagttaaaataaggctagtccgttatcaacttgaaaaagtggcaccgagtcggtgctgcccagagtgaggattgcagaatttgttgactgagccatggaggttatttt

SEQ ID NO: 5668 - RNA, 148 nt, synthetic construct
  source 1..148: mol_type = other RNA; note = pegRNA
gtgtaacctccatggctcaggttttagagctagaaatagcaagttaaaataaggctagtccgttatcaacttgaaaaagtggcaccgagtcggtgctgcccagagtgaggattgcagaatttgtttactgagccatggaggttatttt

SEQ ID NO: 5669 - RNA, 149 nt, synthetic construct
  source 1..149: mol_type = other RNA; note = pegRNA
gtgtaacctccatggctcaggttttagagctagaaatagcaagttaaaataaggctagtccgttatcaacttgaaaaagtggcaccgagtcggtgcacactgcccagagtgaggattgcagaatttgttaactgagccatggaggttac

SEQ ID NO: 5670 - RNA, 149 nt, synthetic construct
  source 1..149: mol_type = other RNA; note = pegRNA
gtgtaacctccatggctcaggttttagagctagaaatagcaagttaaaataaggctagtccgttatcaacttgaaaaagtggcaccgagtcggtgcacactgcccagagtgaggattgcagaatttgttaactgagccatggaggtttt

SEQ ID NO: 5671 - RNA, 149 nt, synthetic construct
  source 1..149: mol_type = other RNA; note = pegRNA
gtgtaacctccatggctcaggttttagagctagaaatagcaagttaaaataaggctagtccgttatcaacttgaaaaagtggcaccgagtcggtgcacactgcccagagtgaggattgcagaatttgttgactgagccatggaggttac

SEQ ID NO: 5672 - RNA, 149 nt, synthetic construct
  source 1..149: mol_type = other RNA; note = pegRNA
gtgtaacctccatggctcaggttttagagctagaaatagcaagttaaaataaggctagtccgttatcaacttgaaaaagtggcaccgagtcggtgcacactgcccagagtgaggattgcagaatttgttgactgagccatggaggtttt

SEQ ID NO: 5673 - RNA, 149 nt, synthetic construct
  source 1..149: mol_type = other RNA; note = pegRNA
gtgtaacctccatggctcaggttttagagctagaaatagcaagttaaaataaggctagtccgttatcaacttgaaaaagtggcaccgagtcggtgcacactgcccagagtgaggattgcagaatttgtttactgagccatggaggttac

SEQ ID NO: 5674 - RNA, 149 nt, synthetic construct
  source 1..149: mol_type = other RNA; note = pegRNA
gtgtaacctccatggctcaggttttagagctagaaatagcaagttaaaataaggctagtccgttatcaacttgaaaaagtggcaccgagtcggtgcacactgcccagagtgaggattgcagaatttgtttactgagccatggaggtttt

SEQ ID NO: 5675 - RNA, 149 nt, synthetic construct
  source 1..149: mol_type = other RNA; note = pegRNA
gtgtaacctccatggctcaggttttagagctagaaatagcaagttaaaataaggctagtccgttatcaacttgaaaaagtggcaccgagtcggtgcactgcccagagtgaggattgcagaatttgttaactgagccatggaggtttttt

SEQ ID NO: 5676 - RNA, 149 nt, synthetic construct
  source 1..149: mol_type = other RNA; note = pegRNA
gtgtaacctccatggctcaggttttagagctagaaatagcaagttaaaataaggctagtccgttatcaacttgaaaaagtggcaccgagtcggtgcactgcccagagtgaggattgcagaatttgttgactgagccatggaggtttttt

SEQ ID NO: 5677 - RNA, 149 nt, synthetic construct
  source 1..149: mol_type = other RNA; note = pegRNA
gtgtaacctccatggctcaggttttagagctagaaatagcaagttaaaataaggctagtccgttatcaacttgaaaaagtggcaccgagtcggtgcactgcccagagtgaggattgcagaatttgtttactgagccatggaggtttttt

SEQ ID NO: 5678 - RNA, 149 nt, synthetic construct
  source 1..149: mol_type = other RNA; note = pegRNA
gtgtaacctccatggctcaggttttagagctagaaatagcaagttaaaataaggctagtccgttatcaacttgaaaaagtggcaccgagtcggtgccacactgcccagagtgaggattgcagaatttgttaactgagccatggaggtta

SEQ ID NO: 5679 - RNA, 149 nt, synthetic construct
  source 1..149: mol_type = other RNA; note = pegRNA
gtgtaacctccatggctcaggttttagagctagaaatagcaagttaaaataaggctagtccgttatcaacttgaaaaagtggcaccgagtcggtgccacactgcccagagtgaggattgcagaatttgttaactgagccatggagtttt

SEQ ID NO: 5680 - RNA, 149 nt, synthetic construct
  source 1..149: mol_type = other RNA; note = pegRNA
gtgtaacctccatggctcaggttttagagctagaaatagcaagttaaaataaggctagtccgttatcaacttgaaaaagtggcaccgagtcggtgccacactgcccagagtgaggattgcagaatttgttgactgagccatggaggtta

SEQ ID NO: 5681 - RNA, 149 nt, synthetic construct
  source 1..149: mol_type = other RNA; note = pegRNA
gtgtaacctccatggctcaggttttagagctagaaatagcaagttaaaataaggctagtccgttatcaacttgaaaaagtggcaccgagtcggtgccacactgcccagagtgaggattgcagaatttgttgactgagccatggagtttt

SEQ ID NO: 5682 - RNA, 149 nt, synthetic construct
  source 1..149: mol_type = other RNA; note = pegRNA
gtgtaacctccatggctcaggttttagagctagaaatagcaagttaaaataaggctagtccgttatcaacttgaaaaagtggcaccgagtcggtgccacactgcccagagtgaggattgcagaatttgtttactgagccatggaggtta

SEQ ID NO: 5683 - RNA, 149 nt, synthetic construct
  source 1..149: mol_type = other RNA; note = pegRNA
gtgtaacctccatggctcaggttttagagctagaaatagcaagttaaaataaggctagtccgttatcaacttgaaaaagtggcaccgagtcggtgccacactgcccagagtgaggattgcagaatttgtttactgagccatggagtttt

SEQ ID NO: 5684 - RNA, 149 nt, synthetic construct
  source 1..149: mol_type = other RNA; note = pegRNA
gtgtaacctccatggctcaggttttagagctagaaatagcaagttaaaataaggctagtccgttatcaacttgaaaaagtggcaccgagtcggtgccactgcccagagtgaggattgcagaatttgttaactgagccatggaggttaca

SEQ ID NO: 5685 - RNA, 149 nt, synthetic construct
  source 1..149: mol_type = other RNA; note = pegRNA
gtgtaacctccatggctcaggttttagagctagaaatagcaagttaaaataaggctagtccgttatcaacttgaaaaagtggcaccgagtcggtgccactgcccagagtgaggattgcagaatttgttaactgagccatggaggttttt

SEQ ID NO: 5686 - RNA, 149 nt, synthetic construct
  source 1..149: mol_type = other RNA; note = pegRNA
gtgtaacctccatggctcaggttttagagctagaaatagcaagttaaaataaggctagtccgttatcaacttgaaaaagtggcaccgagtcggtgccactgcccagagtgaggattgcagaatttgttgactgagccatggaggttaca

SEQ ID NO: 5687 - RNA, 149 nt, synthetic construct
  source 1..149: mol_type = other RNA; note = pegRNA
gtgtaacctccatggctcaggttttagagctagaaatagcaagttaaaataaggctagtccgttatcaacttgaaaaagtggcaccgagtcggtgccactgcccagagtgaggattgcagaatttgttgactgagccatggaggttttt

SEQ ID NO: 5688 - RNA, 149 nt, synthetic construct
  source 1..149: mol_type = other RNA; note = pegRNA
gtgtaacctccatggctcaggttttagagctagaaatagcaagttaaaataaggctagtccgttatcaacttgaaaaagtggcaccgagtcggtgccactgcccagagtgaggattgcagaatttgtttactgagccatggaggttaca

SEQ ID NO: 5689 - RNA, 149 nt, synthetic construct
  source 1..149: mol_type = other RNA; note = pegRNA
gtgtaacctccatggctcaggttttagagctagaaatagcaagttaaaataaggctagtccgttatcaacttgaaaaagtggcaccgagtcggtgccactgcccagagtgaggattgcagaatttgtttactgagccatggaggttttt

SEQ ID NO: 5690 - RNA, 149 nt, synthetic construct
  source 1..149: mol_type = other RNA; note = pegRNA
gtgtaacctccatggctcaggttttagagctagaaatagcaagttaaaataaggctagtccgttatcaacttgaaaaagtggcaccgagtcggtgcctgcccagagtgaggattgcagaatttgttaactgagccatggaggttatttt

SEQ ID NO: 5691 - RNA, 149 nt, synthetic construct
  source 1..149: mol_type = other RNA; note = pegRNA
gtgtaacctccatggctcaggttttagagctagaaatagcaagttaaaataaggctagtccgttatcaacttgaaaaagtggcaccgagtcggtgcctgcccagagtgaggattgcagaatttgttgactgagccatggaggttatttt

SEQ ID NO: 5692 - RNA, 149 nt, synthetic construct
  source 1..149: mol_type = other RNA; note = pegRNA
gtgtaacctccatggctcaggttttagagctagaaatagcaagttaaaataaggctagtccgttatcaacttgaaaaagtggcaccgagtcggtgcctgcccagagtgaggattgcagaatttgtttactgagccatggaggttatttt

SEQ ID NO: 5693 - RNA, 149 nt, synthetic construct
  source 1..149: mol_type = other RNA; note = pegRNA
gtgtaacctccatggctcaggttttagagctagaaatagcaagttaaaataaggctagtccgttatcaacttgaaaaagtggcaccgagtcggtgcgcccagagtgaggattgcagaatttgttaactgagccatggaggttacatttt

SEQ ID NO: 5694 - RNA, 149 nt, synthetic construct
  source 1..149: mol_type = other RNA; note = pegRNA
gtgtaacctccatggctcaggttttagagctagaaatagcaagttaaaataaggctagtccgttatcaacttgaaaaagtggcaccgagtcggtgcgcccagagtgaggattgcagaatttgttgactgagccatggaggttacatttt

SEQ ID NO: 5695 - RNA, 149 nt, synthetic construct
  source 1..149: mol_type = other RNA; note = pegRNA
gtgtaacctccatggctcaggttttagagctagaaatagcaagttaaaataaggctagtccgttatcaacttgaaaaagtggcaccgagtcggtgcgcccagagtgaggattgcagaatttgtttactgagccatggaggttacatttt

SEQ ID NO: 5696 - RNA, 149 nt, synthetic construct
  source 1..149: mol_type = other RNA; note = pegRNA
gtgtaacctccatggctcaggttttagagctagaaatagcaagttaaaataaggctagtccgttatcaacttgaaaaagtggcaccgagtcggtgctcacactgcccagagtgaggattgcagaatttgttaactgagccatggaggtt

SEQ ID NO: 5697 - RNA, 149 nt, synthetic construct
  source 1..149: mol_type = other RNA; note = pegRNA
gtgtaacctccatggctcaggttttagagctagaaatagcaagttaaaataaggctagtccgttatcaacttgaaaaagtggcaccgagtcggtgctcacactgcccagagtgaggattgcagaatttgttaactgagccatggatttt

SEQ ID NO: 5698 - RNA, 149 nt, synthetic construct
  source 1..149: mol_type = other RNA; note = pegRNA
gtgtaacctccatggctcaggttttagagctagaaatagcaagttaaaataaggctagtccgttatcaacttgaaaaagtggcaccgagtcggtgctcacactgcccagagtgaggattgcagaatttgttgactgagccatggaggtt

SEQ ID NO: 5699 - RNA, 149 nt, synthetic construct
  source 1..149: mol_type = other RNA; note = pegRNA
gtgtaacctccatggctcaggttttagagctagaaatagcaagttaaaataaggctagtccgttatcaacttgaaaaagtggcaccgagtcggtgctcacactgcccagagtgaggattgcagaatttgttgactgagccatggatttt

SEQ ID NO: 5700 - RNA, 149 nt, synthetic construct
  source 1..149: mol_type = other RNA; note = pegRNA
gtgtaacctccatggctcaggttttagagctagaaatagcaagttaaaataaggctagtccgttatcaacttgaaaaagtggcaccgagtcggtgctcacactgcccagagtgaggattgcagaatttgtttactgagccatggaggtt

SEQ ID NO: 5701 - RNA, 149 nt, synthetic construct
  source 1..149: mol_type = other RNA; note = pegRNA
gtgtaacctccatggctcaggttttagagctagaaatagcaagttaaaataaggctagtccgttatcaacttgaaaaagtggcaccgagtcggtgctcacactgcccagagtgaggattgcagaatttgtttactgagccatggatttt

SEQ ID NO: 5702 - RNA, 149 nt, synthetic construct
  source 1..149: mol_type = other RNA; note = pegRNA
gtgtaacctccatggctcaggttttagagctagaaatagcaagttaaaataaggctagtccgttatcaacttgaaaaagtggcaccgagtcggtgctgcccagagtgaggattgcagaatttgttaactgagccatggaggttactttt

SEQ ID NO: 5703 - RNA, 149 nt, synthetic construct
  source 1..149: mol_type = other RNA; note = pegRNA
gtgtaacctccatggctcaggttttagagctagaaatagcaagttaaaataaggctagtccgttatcaacttgaaaaagtggcaccgagtcggtgctgcccagagtgaggattgcagaatttgttgactgagccatggaggttactttt

SEQ ID NO: 5704 - RNA, 149 nt, synthetic construct
  source 1..149: mol_type = other RNA; note = pegRNA
gtgtaacctccatggctcaggttttagagctagaaatagcaagttaaaataaggctagtccgttatcaacttgaaaaagtggcaccgagtcggtgctgcccagagtgaggattgcagaatttgtttactgagccatggaggttactttt

SEQ ID NO: 5705 - RNA, 150 nt, synthetic construct
  source 1..150: mol_type = other RNA; note = pegRNA
gtgtaacctccatggctcaggttttagagctagaaatagcaagttaaaataaggctagtccgttatcaacttgaaaaagtggcaccgagtcggtgcacactgcccagagtgaggattgcagaatttgttaactgagccatggaggttaca

SEQ ID NO: 5706 - RNA, 150 nt, synthetic construct
  source 1..150: mol_type = other RNA; note = pegRNA
gtgtaacctccatggctcaggttttagagctagaaatagcaagttaaaataaggctagtccgttatcaacttgaaaaagtggcaccgagtcggtgcacactgcccagagtgaggattgcagaatttgttaactgagccatggaggttttt

SEQ ID NO: 5707 - RNA, 150 nt, synthetic construct
  source 1..150: mol_type = other RNA; note = pegRNA
gtgtaacctccatggctcaggttttagagctagaaatagcaagttaaaataaggctagtccgttatcaacttgaaaaagtggcaccgagtcggtgcacactgcccagagtgaggattgcagaatttgttgactgagccatggaggttaca

SEQ ID NO: 5708 - RNA, 150 nt, synthetic construct
  source 1..150: mol_type = other RNA; note = pegRNA
gtgtaacctccatggctcaggttttagagctagaaatagcaagttaaaataaggctagtccgttatcaacttgaaaaagtggcaccgagtcggtgcacactgcccagagtgaggattgcagaatttgttgactgagccatggaggttttt

SEQ ID NO: 5709 - RNA, 150 nt, synthetic construct
  source 1..150: mol_type = other RNA; note = pegRNA
gtgtaacctccatggctcaggttttagagctagaaatagcaagttaaaataaggctagtccgttatcaacttgaaaaagtggcaccgagtcggtgcacactgcccagagtgaggattgcagaatttgtttactgagccatggaggttaca

SEQ ID NO: 5710 - RNA, 150 nt, synthetic construct
  source 1..150: mol_type = other RNA; note = pegRNA
gtgtaacctccatggctcaggttttagagctagaaatagcaagttaaaataaggctagtccgttatcaacttgaaaaagtggcaccgagtcggtgcacactgcccagagtgaggattgcagaatttgtttactgagccatggaggttttt

SEQ ID NO: 5711 - RNA, 150 nt, synthetic construct
  source 1..150: mol_type = other RNA; note = pegRNA
gtgtaacctccatggctcaggttttagagctagaaatagcaagttaaaataaggctagtccgttatcaacttgaaaaagtggcaccgagtcggtgcactgcccagagtgaggattgcagaatttgttaactgagccatggaggttatttt

SEQ ID NO: 5712 - RNA, 150 nt, synthetic construct
  source 1..150: mol_type = other RNA; note = pegRNA
gtgtaacctccatggctcaggttttagagctagaaatagcaagttaaaataaggctagtccgttatcaacttgaaaaagtggcaccgagtcggtgcactgcccagagtgaggattgcagaatttgttgactgagccatggaggttatttt

SEQ ID NO: 5713 - RNA, 150 nt, synthetic construct
  source 1..150: mol_type = other RNA; note = pegRNA
gtgtaacctccatggctcaggttttagagctagaaatagcaagttaaaataaggctagtccgttatcaacttgaaaaagtggcaccgagtcggtgcactgcccagagtgaggattgcagaatttgtttactgagccatggaggttatttt

SEQ ID NO: 5714 - RNA, 150 nt, synthetic construct
  source 1..150: mol_type = other RNA; note = pegRNA
gtgtaacctccatggctcaggttttagagctagaaatagcaagttaaaataaggctagtccgttatcaacttgaaaaagtggcaccgagtcggtgccacactgcccagagtgaggattgcagaatttgttaactgagccatggaggttac

SEQ ID NO: 5715 - RNA, 150 nt, synthetic construct
  source 1..150: mol_type = other RNA; note = pegRNA
gtgtaacctccatggctcaggttttagagctagaaatagcaagttaaaataaggctagtccgttatcaacttgaaaaagtggcaccgagtcggtgccacactgcccagagtgaggattgcagaatttgttaactgagccatggaggtttt

SEQ ID NO: 5716 - RNA, 150 nt, synthetic construct
  source 1..150: mol_type = other RNA; note = pegRNA
gtgtaacctccatggctcaggttttagagctagaaatagcaagttaaaataaggctagtccgttatcaacttgaaaaagtggcaccgagtcggtgccacactgcccagagtgaggattgcagaatttgttgactgagccatggaggttac

SEQ ID NO: 5717 - RNA, 150 nt, synthetic construct
  source 1..150: mol_type = other RNA; note = pegRNA
gtgtaacctccatggctcaggttttagagctagaaatagcaagttaaaataaggctagtccgttatcaacttgaaaaagtggcaccgagtcggtgccacactgcccagagtgaggattgcagaatttgttgactgagccatggaggtttt

SEQ ID NO: 5718 - RNA, 150 nt, synthetic construct
  source 1..150: mol_type = other RNA; note = pegRNA
gtgtaacctccatggctcaggttttagagctagaaatagcaagttaaaataaggctagtccgttatcaacttgaaaaagtggcaccgagtcggtgccacactgcccagagtgaggattgcagaatttgtttactgagccatggaggttac

SEQ ID NO: 5719 - RNA, 150 nt, synthetic construct
  source 1..150: mol_type = other RNA; note = pegRNA
gtgtaacctccatggctcaggttttagagctagaaatagcaagttaaaataaggctagtccgttatcaacttgaaaaagtggcaccgagtcggtgccacactgcccagagtgaggattgcagaatttgtttactgagccatggaggtttt

SEQ ID NO: 5720 - RNA, 150 nt, synthetic construct
  source 1..150: mol_type = other RNA; note = pegRNA
gtgtaacctccatggctcaggttttagagctagaaatagcaagttaaaataaggctagtccgttatcaacttgaaaaagtggcaccgagtcggtgccactgcccagagtgaggattgcagaatttgttaactgagccatggaggtttttt

SEQ ID NO: 5721 - RNA, 150 nt, synthetic construct
  source 1..150: mol_type = other RNA; note = pegRNA
gtgtaacctccatggctcaggttttagagctagaaatagcaagttaaaataaggctagtccgttatcaacttgaaaaagtggcaccgagtcggtgccactgcccagagtgaggattgcagaatttgttgactgagccatggaggtttttt

SEQ ID NO: 5722 - RNA, 150 nt, synthetic construct
  source 1..150: mol_type = other RNA; note = pegRNA
gtgtaacctccatggctcaggttttagagctagaaatagcaagttaaaataaggctagtccgttatcaacttgaaaaagtggcaccgagtcggtgccactgcccagagtgaggattgcagaatttgtttactgagccatggaggtttttt

SEQ ID NO: 5723 - RNA, 150 nt, synthetic construct
  source 1..150: mol_type = other RNA; note = pegRNA
gtgtaacctccatggctcaggttttagagctagaaatagcaagttaaaataaggctagtccgttatcaacttgaaaaagtggcaccgagtcggtgcctgcccagagtgaggattgcagaatttgttaactgagccatggaggttactttt

SEQ ID NO: 5724 - RNA, 150 nt, synthetic construct
  source 1..150: mol_type = other RNA; note = pegRNA
gtgtaacctccatggctcaggttttagagctagaaatagcaagttaaaataaggctagtccgttatcaacttgaaaaagtggcaccgagtcggtgcctgcccagagtgaggattgcagaatttgttgactgagccatggaggttactttt

SEQ ID NO: 5725 - RNA, 150 nt, synthetic construct
  source 1..150: mol_type = other RNA; note = pegRNA
gtgtaacctccatggctcaggttttagagctagaaatagcaagttaaaataaggctagtccgttatcaacttgaaaaagtggcaccgagtcggtgcctgcccagagtgaggattgcagaatttgtttactgagccatggaggttactttt

SEQ ID NO: 5726 - RNA, 150 nt, synthetic construct
  source 1..150: mol_type = other RNA; note = pegRNA
gtgtaacctccatggctcaggttttagagctagaaatagcaagttaaaataaggctagtccgttatcaacttgaaaaagtggcaccgagtcggtgctcacactgcccagagtgaggattgcagaatttgttaactgagccatggaggtta

SEQ ID NO: 5727 - RNA, 150 nt, synthetic construct
  source 1..150: mol_type = other RNA; note = pegRNA
gtgtaacctccatggctcaggttttagagctagaaatagcaagttaaaataaggctagtccgttatcaacttgaaaaagtggcaccgagtcggtgctcacactgcccagagtgaggattgcagaatttgttaactgagccatggagtttt

SEQ ID NO: 5728 - RNA, 150 nt, synthetic construct
  source 1..150: mol_type = other RNA; note = pegRNA
gtgtaacctccatggctcaggttttagagctagaaatagcaagttaaaataaggctagtccgttatcaacttgaaaaagtggcaccgagtcggtgctcacactgcccagagtgaggattgcagaatttgttgactgagccatggaggtta

SEQ ID NO: 5729 - RNA, 150 nt, synthetic construct
  source 1..150: mol_type = other RNA; note = pegRNA
gtgtaacctccatggctcaggttttagagctagaaatagcaagttaaaataaggctagtccgttatcaacttgaaaaagtggcaccgagtcggtgctcacactgcccagagtgaggattgcagaatttgttgactgagccatggagtttt

SEQ ID NO: 5730 - RNA, 150 nt, synthetic construct
  source 1..150: mol_type = other RNA; note = pegRNA
gtgtaacctccatggctcaggttttagagctagaaatagcaagttaaaataaggctagtccgttatcaacttgaaaaagtggcaccgagtcggtgctcacactgcccagagtgaggattgcagaatttgtttactgagccatggaggtta

SEQ ID NO: 5731 - RNA, 150 nt, synthetic construct
  source 1..150: mol_type = other RNA; note = pegRNA
gtgtaacctccatggctcaggttttagagctagaaatagcaagttaaaataaggctagtccgttatcaacttgaaaaagtggcaccgagtcggtgctcacactgcccagagtgaggattgcagaatttgtttactgagccatggagtttt

SEQ ID NO: 5732 - RNA, 150 nt, synthetic construct
  source 1..150: mol_type = other RNA; note = pegRNA
gtgtaacctccatggctcaggttttagagctagaaatagcaagttaaaataaggctagtccgttatcaacttgaaaaagtggcaccgagtcggtgctgcccagagtgaggattgcagaatttgttaactgagccatggaggttacatttt

SEQ ID NO: 5733 - RNA, 150 nt, synthetic construct
  source 1..150: mol_type = other RNA; note = pegRNA
gtgtaacctccatggctcaggttttagagctagaaatagcaagttaaaataaggctagtccgttatcaacttgaaaaagtggcaccgagtcggtgctgcccagagtgaggattgcagaatttgttgactgagccatggaggttacatttt

SEQ ID NO: 5734 - RNA, 150 nt, synthetic construct
  source 1..150: mol_type = other RNA; note = pegRNA
gtgtaacctccatggctcaggttttagagctagaaatagcaagttaaaataaggctagtccgttatcaacttgaaaaagtggcaccgagtcggtgctgcccagagtgaggattgcagaatttgtttactgagccatggaggttacatttt

SEQ ID NO: 5735 - RNA, 151 nt, synthetic construct
  source 1..151: mol_type = other RNA; note = pegRNA
gtgtaacctccatggctcaggttttagagctagaaatagcaagttaaaataaggctagtccgttatcaacttgaaaaagtggcaccgagtcggtgcacactgcccagagtgaggattgcagaatttgttaactgagccatggaggtttttt

SEQ ID NO: 5736 - RNA, 151 nt, synthetic construct
  source 1..151: mol_type = other RNA; note = pegRNA
gtgtaacctccatggctcaggttttagagctagaaatagcaagttaaaataaggctagtccgttatcaacttgaaaaagtggcaccgagtcggtgcacactgcccagagtgaggattgcagaatttgttgactgagccatggaggtttttt

SEQ ID NO: 5737 - RNA, 151 nt, synthetic construct
  source 1..151: mol_type = other RNA; note = pegRNA
gtgtaacctccatggctcaggttttagagctagaaatagcaagttaaaataaggctagtccgttatcaacttgaaaaagtggcaccgagtcggtgcacactgcccagagtgaggattgcagaatttgtttactgagccatggaggtttttt

SEQ ID NO: 5738 - RNA, 151 nt, synthetic construct
  source 1..151: mol_type = other RNA; note = pegRNA
gtgtaacctccatggctcaggttttagagctagaaatagcaagttaaaataaggctagtccgttatcaacttgaaaaagtggcaccgagtcggtgcactgcccagagtgaggattgcagaatttgttaactgagccatggaggttactttt

SEQ ID NO: 5739 - RNA, 151 nt, synthetic construct
  source 1..151: mol_type = other RNA; note = pegRNA
gtgtaacctccatggctcaggttttagagctagaaatagcaagttaaaataaggctagtccgttatcaacttgaaaaagtggcaccgagtcggtgcactgcccagagtgaggattgcagaatttgttgactgagccatggaggttactttt

SEQ ID NO: 5740 - RNA, 151 nt, synthetic construct
  source 1..151: mol_type = other RNA; note = pegRNA
gtgtaacctccatggctcaggttttagagctagaaatagcaagttaaaataaggctagtccgttatcaacttgaaaaagtggcaccgagtcggtgcactgcccagagtgaggattgcagaatttgtttactgagccatggaggttactttt

SEQ ID NO: 5741 - RNA, 151 nt, synthetic construct
  source 1..151: mol_type = other RNA; note = pegRNA
gtgtaacctccatggctcaggttttagagctagaaatagcaagttaaaataaggctagtccgttatcaacttgaaaaagtggcaccgagtcggtgccacactgcccagagtgaggattgcagaatttgttaactgagccatggaggttaca

SEQ ID NO: 5742 - RNA, 151 nt, synthetic construct
  source 1..151: mol_type = other RNA; note = pegRNA
gtgtaacctccatggctcaggttttagagctagaaatagcaagttaaaataaggctagtccgttatcaacttgaaaaagtggcaccgagtcggtgccacactgcccagagtgaggattgcagaatttgttaactgagccatggaggttttt

SEQ ID NO: 5743 - RNA, 151 nt, synthetic construct
  source 1..151: mol_type = other RNA; note = pegRNA
gtgtaacctccatggctcaggttttagagctagaaatagcaagttaaaataaggctagtccgttatcaacttgaaaaagtggcaccgagtcggtgccacactgcccagagtgaggattgcagaatttgttgactgagccatggaggttaca

SEQ ID NO: 5744 - RNA, 151 nt, synthetic construct
  source 1..151: mol_type = other RNA; note = pegRNA
gtgtaacctccatggctcaggttttagagctagaaatagcaagttaaaataaggctagtccgttatcaacttgaaaaagtggcaccgagtcggtgccacactgcccagagtgaggattgcagaatttgttgactgagccatggaggttttt

SEQ ID NO: 5745 - RNA, 151 nt, synthetic construct
  source 1..151: mol_type = other RNA; note = pegRNA
gtgtaacctccatggctcaggttttagagctagaaatagcaagttaaaataaggctagtccgttatcaacttgaaaaagtggcaccgagtcggtgccacactgcccagagtgaggattgcagaatttgtttactgagccatggaggttaca

SEQ ID NO: 5746 - RNA, 151 nt, synthetic construct
  source 1..151: mol_type = other RNA; note = pegRNA
gtgtaacctccatggctcaggttttagagctagaaatagcaagttaaaataaggctagtccgttatcaacttgaaaaagtggcaccgagtcggtgccacactgcccagagtgaggattgcagaatttgtttactgagccatggaggttttt

SEQ ID NO: 5747 - RNA, 151 nt, synthetic construct
  source 1..151: mol_type = other RNA; note = pegRNA
gtgtaacctccatggctcaggttttagagctagaaatagcaagttaaaataaggctagtccgttatcaacttgaaaaagtggcaccgagtcggtgccactgcccagagtgaggattgcagaatttgttaactgagccatggaggttatttt

SEQ ID NO: 5748 - RNA, 151 nt, synthetic construct
  source 1..151: mol_type = other RNA; note = pegRNA
gtgtaacctccatggctcaggttttagagctagaaatagcaagttaaaataaggctagtccgttatcaacttgaaaaagtggcaccgagtcggtgccactgcccagagtgaggattgcagaatttgttgactgagccatggaggttatttt

SEQ ID NO: 5749 - RNA, 151 nt, synthetic construct
  source 1..151: mol_type = other RNA; note = pegRNA
gtgtaacctccatggctcaggttttagagctagaaatagcaagttaaaataaggctagtccgttatcaacttgaaaaagtggcaccgagtcggtgccactgcccagagtgaggattgcagaatttgtttactgagccatggaggttatttt

SEQ ID NO: 5750 - RNA, 151 nt, synthetic construct
  source 1..151: mol_type = other RNA; note = pegRNA
gtgtaacctccatggctcaggttttagagctagaaatagcaagttaaaataaggctagtccgttatcaacttgaaaaagtggcaccgagtcggtgcctgcccagagtgaggattgcagaatttgttaactgagccatggaggttacatttt

SEQ ID NO: 5751 - RNA, 151 nt, synthetic construct
  source 1..151: mol_type = other RNA; note = pegRNA
gtgtaacctccatggctcaggttttagagctagaaatagcaagttaaaataaggctagtccgttatcaacttgaaaaagtggcaccgagtcggtgcctgcccagagtgaggattgcagaatttgttgactgagccatggaggttacatttt

SEQ ID NO: 5752 - RNA, 151 nt, synthetic construct
  source 1..151: mol_type = other RNA; note = pegRNA
gtgtaacctccatggctcaggttttagagctagaaatagcaagttaaaataaggctagtccgttatcaacttgaaaaagtggcaccgagtcggtgcctgcccagagtgaggattgcagaatttgtttactgagccatggaggttacatttt

SEQ ID NO: 5753 - RNA, 151 nt, synthetic construct
  source 1..151: mol_type = other RNA; note = pegRNA
gtgtaacctccatggctcaggttttagagctagaaatagcaagttaaaataaggctagtccgttatcaacttgaaaaagtggcaccgagtcggtgctcacactgcccagagtgaggattgcagaatttgttaactgagccatggaggttac

SEQ ID NO: 5754 - RNA, 151 nt, synthetic construct
  source 1..151: mol_type = other RNA; note = pegRNA
gtgtaacctccatggctcaggttttagagctagaaatagcaagttaaaataaggctagtccgttatcaacttgaaaaagtggcaccgagtcggtgctcacactgcccagagtgaggattgcagaatttgttaactgagccatggaggtttt

SEQ ID NO: 5755 - RNA, 151 nt, synthetic construct
  source 1..151: mol_type = other RNA; note = pegRNA
gtgtaacctccatggctcaggttttagagctagaaatagcaagttaaaataaggctagtccgttatcaacttgaaaaagtggcaccgagtcggtgctcacactgcccagagtgaggattgcagaatttgttgactgagccatggaggttac

SEQ ID NO: 5756 - RNA, 151 nt, synthetic construct
  source 1..151: mol_type = other RNA; note = pegRNA
gtgtaacctccatggctcaggttttagagctagaaatagcaagttaaaataaggctagtccgttatcaacttgaaaaagtggcaccgagtcggtgctcacactgcccagagtgaggattgcagaatttgttgactgagccatggaggtttt

SEQ ID NO: 5757 - RNA, 151 nt, synthetic construct
  source 1..151: mol_type = other RNA; note = pegRNA
gtgtaacctccatggctcaggttttagagctagaaatagcaagttaaaataaggctagtccgttatcaacttgaaaaagtggcaccgagtcggtgctcacactgcccagagtgaggattgcagaatttgtttactgagccatggaggttac

SEQ ID NO: 5758 - RNA, 151 nt, synthetic construct
  source 1..151: mol_type = other RNA; note = pegRNA
gtgtaacctccatggctcaggttttagagctagaaatagcaagttaaaataaggctagtccgttatcaacttgaaaaagtggcaccgagtcggtgctcacactgcccagagtgaggattgcagaatttgtttactgagccatggaggtttt

SEQ ID NO: 5759 - RNA, 152 nt, synthetic construct
  source 1..152: mol_type = other RNA; note = pegRNA
gtgtaacctccatggctcaggttttagagctagaaatagcaagttaaaataaggctagtccgttatcaacttgaaaaagtggcaccgagtcggtgcacactgcccagagtgaggattgcagaatttgttaactgagccatggaggttatttt

SEQ ID NO: 5760 - RNA, 152 nt, synthetic construct
  source 1..152: mol_type = other RNA; note = pegRNA
gtgtaacctccatggctcaggttttagagctagaaatagcaagttaaaataaggctagtccgttatcaacttgaaaaagtggcaccgagtcggtgcacactgcccagagtgaggattgcagaatttgttgactgagccatggaggttatttt

SEQ ID NO: 5761 - RNA, 152 nt, synthetic construct
  source 1..152: mol_type = other RNA; note = pegRNA
gtgtaacctccatggctcaggttttagagctagaaatagcaagttaaaataaggctagtccgttatcaacttgaaaaagtggcaccgagtcggtgcacactgcccagagtgaggattgcagaatttgtttactgagccatggaggttatttt

SEQ ID NO: 5762 - RNA, 152 nt, synthetic construct
  source 1..152: mol_type = other RNA; note = pegRNA
gtgtaacctccatggctcaggttttagagctagaaatagcaagttaaaataaggctagtccgttatcaacttgaaaaagtggcaccgagtcggtgcactgcccagagtgaggattgcagaatttgttaactgagccatggaggttacatttt

SEQ ID NO: 5763 - RNA, 152 nt, synthetic construct
  source 1..152: mol_type = other RNA; note = pegRNA
gtgtaacctccatggctcaggttttagagctagaaatagcaagttaaaataaggctagtccgttatcaacttgaaaaagtggcaccgagtcggtgcactgcccagagtgaggattgcagaatttgttgactgagccatggaggttacatttt

SEQ ID NO: 5764 - RNA, 152 nt, synthetic construct
  source 1..152: mol_type = other RNA; note = pegRNA
gtgtaacctccatggctcaggttttagagctagaaatagcaagttaaaataaggctagtccgttatcaacttgaaaaagtggcaccgagtcggtgcactgcccagagtgaggattgcagaatttgtttactgagccatggaggttacatttt

SEQ ID NO: 5765 - RNA, 152 nt, synthetic construct
  source 1..152: mol_type = other RNA; note = pegRNA
gtgtaacctccatggctcaggttttagagctagaaatagcaagttaaaataaggctagtccgttatcaacttgaaaaagtggcaccgagtcggtgccacactgcccagagtgaggattgcagaatttgttaactgagccatggaggtttttt

SEQ ID NO: 5766 - RNA, 152 nt, synthetic construct
  source 1..152: mol_type = other RNA; note = pegRNA
gtgtaacctccatggctcaggttttagagctagaaatagcaagttaaaataaggctagtccgttatcaacttgaaaaagtggcaccgagtcggtgccacactgcccagagtgaggattgcagaatttgttgactgagccatggaggtttttt

SEQ ID NO: 5767 - RNA, 152 nt, synthetic construct
  source 1..152: mol_type = other RNA; note = pegRNA
gtgtaacctccatggctcaggttttagagctagaaatagcaagttaaaataaggctagtccgttatcaacttgaaaaagtggcaccgagtcggtgccacactgcccagagtgaggattgcagaatttgtttactgagccatggaggtttttt

SEQ ID NO: 5768 - RNA, 152 nt, synthetic construct
  source 1..152: mol_type = other RNA; note = pegRNA
gtgtaacctccatggctcaggttttagagctagaaatagcaagttaaaataaggctagtccgttatcaacttgaaaaagtggcaccgagtcggtgccactgcccagagtgaggattgcagaatttgttaactgagccatggaggttactttt

SEQ ID NO: 5769 - RNA, 152 nt, synthetic construct
  source 1..152: mol_type = other RNA; note = pegRNA
gtgtaacctccatggctcaggttttagagctagaaatagcaagttaaaataaggctagtccgttatcaacttgaaaaagtggcaccgagtcggtgccactgcccagagtgaggattgcagaatttgttgactgagccatggaggttactttt

SEQ ID NO: 5770 - RNA, 152 nt, synthetic construct
  source 1..152: mol_type = other RNA; note = pegRNA
gtgtaacctccatggctcaggttttagagctagaaatagcaagttaaaataaggctagtccgttatcaacttgaaaaagtggcaccgagtcggtgccactgcccagagtgaggattgcagaatttgtttactgagccatggaggttactttt

SEQ ID NO: 5771 - RNA, 152 nt, synthetic construct
  source 1..152: mol_type = other RNA; note = pegRNA
gtgtaacctccatggctcaggttttagagctagaaatagcaagttaaaataaggctagtccgttatcaacttgaaaaagtggcaccgagtcggtgctcacactgcccagagtgaggattgcagaatttgttaactgagccatggaggttaca

SEQ ID NO: 5772 - RNA, 152 nt, synthetic construct
  source 1..152: mol_type = other RNA; note = pegRNA
gtgtaacctccatggctcaggttttagagctagaaatagcaagttaaaataaggctagtccgttatcaacttgaaaaagtggcaccgagtcggtgctcacactgcccagagtgaggattgcagaatttgttaactgagccatggaggttttt

SEQ ID NO: 5773 - RNA, 152 nt, synthetic construct
  source 1..152: mol_type = other RNA; note = pegRNA
gtgtaacctccatggctcaggttttagagctagaaatagcaagttaaaataaggctagtccgttatcaacttgaaaaagtggcaccgagtcggtgctcacactgcccagagtgaggattgcagaatttgttgactgagccatggaggttaca

SEQ ID NO: 5774 - RNA, 152 nt, synthetic construct
  source 1..152: mol_type = other RNA; note = pegRNA
gtgtaacctccatggctcaggttttagagctagaaatagcaagttaaaataaggctagtccgttatcaacttgaaaaagtggcaccgagtcggtgctcacactgcccagagtgaggattgcagaatttgttgactgagccatggaggttttt

SEQ ID NO: 5775 - RNA, 152 nt, synthetic construct
  source 1..152: mol_type = other RNA; note = pegRNA
gtgtaacctccatggctcaggttttagagctagaaatagcaagttaaaataaggctagtccgttatcaacttgaaaaagtggcaccgagtcggtgctcacactgcccagagtgaggattgcagaatttgtttactgagccatggaggttaca

SEQ ID NO: 5776 - RNA, 152 nt, synthetic construct
  source 1..152: mol_type = other RNA; note = pegRNA
gtgtaacctccatggctcaggttttagagctagaaatagcaagttaaaataaggctagtccgttatcaacttgaaaaagtggcaccgagtcggtgctcacactgcccagagtgaggattgcagaatttgtttactgagccatggaggttttt

SEQ ID NO: 5777 - RNA, 153 nt, synthetic construct
  source 1..153: mol_type = other RNA; note = pegRNA
gtgtaacctccatggctcaggttttagagctagaaatagcaagttaaaataaggctagtccgttatcaacttgaaaaagtggcaccgagtcggtgcacactgcccagagtgaggattgcagaatttgttaactgagccatggaggttactttt

SEQ ID NO: 5778 - RNA, 153 nt, synthetic construct
  source 1..153: mol_type = other RNA; note = pegRNA
gtgtaacctccatggctcaggttttagagctagaaatagcaagttaaaataaggctagtccgttatcaacttgaaaaagtggcaccgagtcggtgcacactgcccagagtgaggattgcagaatttgttgactgagccatggaggttactttt

SEQ ID NO: 5779 - RNA, 153 nt, synthetic construct
  source 1..153: mol_type = other RNA; note = pegRNA
gtgtaacctccatggctcaggttttagagctagaaatagcaagttaaaataaggctagtccgttatcaacttgaaaaagtggcaccgagtcggtgcacactgcccagagtgaggattgcagaatttgtttactgagccatggaggttactttt

SEQ ID NO: 5780 - RNA, 153 nt, synthetic construct
  source 1..153: mol_type = other RNA; note = pegRNA
gtgtaacctccatggctcaggttttagagctagaaatagcaagttaaaataaggctagtccgttatcaacttgaaaaagtggcaccgagtcggtgccacactgcccagagtgaggattgcagaatttgttaactgagccatggaggttatttt

SEQ ID NO: 5781 - RNA, 153 nt, synthetic construct
  source 1..153: mol_type = other RNA; note = pegRNA
gtgtaacctccatggctcaggttttagagctagaaatagcaagttaaaataaggctagtccgttatcaacttgaaaaagtggcaccgagtcggtgccacactgcccagagtgaggattgcagaatttgttgactgagccatggaggttatttt

SEQ ID NO: 5782 - RNA, 153 nt, synthetic construct
  source 1..153: mol_type = other RNA; note = pegRNA
gtgtaacctccatggctcaggttttagagctagaaatagcaagttaaaataaggctagtccgttatcaacttgaaaaagtggcaccgagtcggtgccacactgcccagagtgaggattgcagaatttgtttactgagccatggaggttatttt

SEQ ID NO: 5783 - RNA, 153 nt, synthetic construct
  source 1..153: mol_type = other RNA; note = pegRNA
gtgtaacctccatggctcaggttttagagctagaaatagcaagttaaaataaggctagtccgttatcaacttgaaaaagtggcaccgagtcggtgccactgcccagagtgaggattgcagaatttgttaactgagccatggaggttacatttt

SEQ ID NO: 5784 - RNA, 153 nt, synthetic construct
  source 1..153: mol_type = other RNA; note = pegRNA
gtgtaacctccatggctcaggttttagagctagaaatagcaagttaaaataaggctagtccgttatcaacttgaaaaagtggcaccgagtcggtgccactgcccagagtgaggattgcagaatttgttgactgagccatggaggttacatttt

SEQ ID NO: 5785 - RNA, 153 nt, synthetic construct
  source 1..153: mol_type = other RNA; note = pegRNA
gtgtaacctccatggctcaggttttagagctagaaatagcaagttaaaataaggctagtccgttatcaacttgaaaaagtggcaccgagtcggtgccactgcccagagtgaggattgcagaatttgtttactgagccatggaggttacatttt

SEQ ID NO: 5786 - RNA, 153 nt, synthetic construct
  source 1..153: mol_type = other RNA; note = pegRNA
gtgtaacctccatggctcaggttttagagctagaaatagcaagttaaaataaggctagtccgttatcaacttgaaaaagtggcaccgagtcggtgctcacactgcccagagtgaggattgcagaatttgttaactgagccatggaggtttttt

SEQ ID NO: 5787 - RNA, 153 nt, synthetic construct
  source 1..153: mol_type = other RNA; note = pegRNA
gtgtaacctccatggctcaggttttagagctagaaatagcaagttaaaataaggctagtccgttatcaacttgaaaaagtggcaccgagtcggtgctcacactgcccagagtgaggattgcagaatttgttgactgagccatggaggtttttt

SEQ ID NO: 5788 - RNA, 153 nt, synthetic construct
  source 1..153: mol_type = other RNA; note = pegRNA
gtgtaacctccatggctcaggttttagagctagaaatagcaagttaaaataaggctagtccgttatcaacttgaaaaagtggcaccgagtcggtgctcacactgcccagagtgaggattgcagaatttgtttactgagccatggaggtttttt

SEQ ID NO: 5789 - RNA, 154 nt, synthetic construct
  source 1..154: mol_type = other RNA; note = pegRNA
gtgtaacctccatggctcaggttttagagctagaaatagcaagttaaaataaggctagtccgttatcaacttgaaaaagtggcaccgagtcggtgcacactgcccagagtgaggattgcagaatttgttaactgagccatggaggttacatttt

SEQ ID NO: 5790 - RNA, 154 nt, synthetic construct
  source 1..154: mol_type = other RNA; note = pegRNA
gtgtaacctccatggctcaggttttagagctagaaatagcaagttaaaataaggctagtccgttatcaacttgaaaaagtggcaccgagtcggtgcacactgcccagagtgaggattgcagaatttgttgactgagccatggaggttacatttt

SEQ ID NO: 5791 - RNA, 154 nt, synthetic construct
  source 1..154: mol_type = other RNA; note = pegRNA
gtgtaacctccatggctcaggttttagagctagaaatagcaagttaaaataaggctagtccgttatcaacttgaaaaagtggcaccgagtcggtgcacactgcccagagtgaggattgcagaatttgtttactgagccatggaggttacatttt

SEQ ID NO: 5792 - RNA, 154 nt, synthetic construct
  source 1..154: mol_type = other RNA; note = pegRNA
gtgtaacctccatggctcaggttttagagctagaaatagcaagttaaaataaggctagtccgttatcaacttgaaaaagtggcaccgagtcggtgccacactgcccagagtgaggattgcagaatttgttaactgagccatggaggttactttt

SEQ ID NO: 5793 - RNA, 154 nt, synthetic construct
  source 1..154: mol_type = other RNA; note = pegRNA
gtgtaacctccatggctcaggttttagagctagaaatagcaagttaaaataaggctagtccgttatcaacttgaaaaagtggcaccgagtcggtgccacactgcccagagtgaggattgcagaatttgttgactgagccatggaggttactttt

SEQ ID NO: 5794 - RNA, 154 nt, synthetic construct
  source 1..154: mol_type = other RNA; note = pegRNA
gtgtaacctccatggctcaggttttagagctagaaatagcaagttaaaataaggctagtccgttatcaacttgaaaaagtggcaccgagtcggtgccacactgcccagagtgaggattgcagaatttgtttactgagccatggaggttactttt

SEQ ID NO: 5795 - RNA, 154 nt, synthetic construct
  source 1..154: mol_type = other RNA; note = pegRNA
gtgtaacctccatggctcaggttttagagctagaaatagcaagttaaaataaggctagtccgttatcaacttgaaaaagtggcaccgagtcggtgctcacactgcccagagtgaggattgcagaatttgttaactgagccatggaggttatttt

SEQ ID NO: 5796 - RNA, 154 nt, synthetic construct
  source 1..154: mol_type = other RNA; note = pegRNA
gtgtaacctccatggctcaggttttagagctagaaatagcaagttaaaataaggctagtccgttatcaacttgaaaaagtggcaccgagtcggtgctcacactgcccagagtgaggattgcagaatttgttgactgagccatggaggttatttt

SEQ ID NO: 5797 - RNA, 154 nt, synthetic construct
  source 1..154: mol_type = other RNA; note = pegRNA
gtgtaacctccatggctcaggttttagagctagaaatagcaagttaaaataaggctagtccgttatcaacttgaaaaagtggcaccgagtcggtgctcacactgcccagagtgaggattgcagaatttgtttactgagccatggaggttatttt

SEQ ID NO: 5798 - RNA, 155 nt, synthetic construct
  source 1..155: mol_type = other RNA; note = pegRNA
gtgtaacctccatggctcaggttttagagctagaaatagcaagttaaaataaggctagtccgttatcaacttgaaaaagtggcaccgagtcggtgccacactgcccagagtgaggattgcagaatttgttaactgagccatggaggttacatttt

SEQ ID NO: 5799 - RNA, 155 nt, synthetic construct
  source 1..155: mol_type = other RNA; note = pegRNA
gtgtaacctccatggctcaggttttagagctagaaatagcaagttaaaataaggctagtccgttatcaacttgaaaaagtggcaccgagtcggtgccacactgcccagagtgaggattgcagaatttgttgactgagccatggaggttacatttt

SEQ ID NO: 5800 - RNA, 155 nt, synthetic construct
  source 1..155: mol_type = other RNA; note = pegRNA
gtgtaacctccatggctcaggttttagagctagaaatagcaagttaaaataaggctagtccgttatcaacttgaaaaagtggcaccgagtcggtgccacactgcccagagtgaggattgcagaatttgtttactgagccatggaggttacatttt

SEQ ID NO: 5801 - RNA, 155 nt, synthetic construct
  source 1..155: mol_type = other RNA; note = pegRNA
gtgtaacctccatggctcaggttttagagctagaaatagcaagttaaaataaggctagtccgttatcaacttgaaaaagtggcaccgagtcggtgctcacactgcccagagtgaggattgcagaatttgttaactgagccatggaggttactttt

SEQ ID NO: 5802 - RNA, 155 nt, synthetic construct
  source 1..155: mol_type = other RNA; note = pegRNA
gtgtaacctccatggctcaggttttagagctagaaatagcaagttaaaataaggctagtccgttatcaacttgaaaaagtggcaccgagtcggtgctcacactgcccagagtgaggattgcagaatttgttgactgagccatggaggttactttt

SEQ ID NO: 5803 - RNA, 155 nt, synthetic construct
  source 1..155: mol_type = other RNA; note = pegRNA
gtgtaacctccatggctcaggttttagagctagaaatagcaagttaaaataaggctagtccgttatcaacttgaaaaagtggcaccgagtcggtgctcacactgcccagagtgaggattgcagaatttgtttactgagccatggaggttactttt

SEQ ID NO: 5804 - RNA, 156 nt, synthetic construct
  source 1..156: mol_type = other RNA; note = pegRNA
gtgtaacctccatggctcaggttttagagctagaaatagcaagttaaaataaggctagtccgttatcaacttgaaaaagtggcaccgagtcggtgctcacactgcccagagtgaggattgcagaatttgttaactgagccatggaggttacatttt

SEQ ID NO: 5805 - RNA, 156 nt, synthetic construct
  source 1..156: mol_type = other RNA; note = pegRNA
gtgtaacctccatggctcaggttttagagctagaaatagcaagttaaaataaggctagtccgttatcaacttgaaaaagtggcaccgagtcggtgctcacactgcccagagtgaggattgcagaatttgttgactgagccatggaggttacatttt

SEQ ID NO: 5806 - RNA, 156 nt, synthetic construct
  source 1..156: mol_type = other RNA; note = pegRNA
gtgtaacctccatggctcaggttttagagctagaaatagcaagttaaaataaggctagtccgttatcaacttgaaaaagtggcaccgagtcggtgctcacactgcccagagtgaggattgcagaatttgtttactgagccatggaggttacatttt

SEQ ID NO: 5807-5811 - skipped (5 entries)

SEQ ID NO: 5812 - RNA, 10 nt, synthetic construct
  source 1..10: mol_type = other RNA; note = PBS
ccatggaggt

SEQ ID NO: 5813 - RNA, 11 nt, synthetic construct
  source 1..11: mol_type = other RNA; note = PBS
ccatggaggtt

SEQ ID NO: 5814 - RNA, 12 nt, synthetic construct
  source 1..12: mol_type = other RNA; note = PBS
ccatggaggtta

SEQ ID NO: 5815 - RNA, 13 nt, synthetic construct
  source 1..13: mol_type = other RNA; note = PBS
ccatggaggttac

SEQ ID NO: 5816 - RNA, 14 nt, synthetic construct
  source 1..14: mol_type = other RNA; note = PBS
ccatggaggttaca

SEQ ID NO: 5817 - RNA, 15 nt, synthetic construct
  source 1..15: mol_type = other RNA; note = PBS
ccatggaggttacac

SEQ ID NO: 5818 - RNA, 16 nt, synthetic construct
  source 1..16: mol_type = other RNA; note = PBS
ccatggaggttacact

SEQ ID NO: 5819 - RNA, 17 nt, synthetic construct
  source 1..17: mol_type = other RNA; note = PBS
ccatggaggttacactg

SEQ ID NO: 5820 - RNA, 18 nt, synthetic construct
  source 1..18: mol_type = other RNA; note = PBS
ccatggaggttacactgg

SEQ ID NO: 5821 - RNA, 19 nt, synthetic construct
  source 1..19: mol_type = other RNA; note = PBS
ccatggaggttacactggc

SEQ ID NO: 5822 - RNA, 17 nt, synthetic construct
  source 1..17: mol_type = other RNA; note = PEgRNA spacer (AG PAM)
tgtaacctccatggctc

SEQ ID NO: 5823 - RNA, 18 nt, synthetic construct
  source 1..18: mol_type = other RNA; note = PEgRNA spacer (AG PAM)
gtgtaacctccatggctc

SEQ ID NO: 5824 - RNA, 19 nt, synthetic construct
  source 1..19: mol_type = other RNA; note = PEgRNA spacer (AG PAM)
agtgtaacctccatggctc

SEQ ID NO: 5825 - RNA, 21 nt, synthetic construct
  source 1..21: mol_type = other RNA; note = PEgRNA spacer (AG PAM)
ccagtgtaacctccatggctc

SEQ ID NO: 5826 - RNA, 22 nt, synthetic construct
  source 1..22: mol_type = other RNA; note = PEgRNA spacer (AG PAM)
gccagtgtaacctccatggctc

SEQ ID NO: 5827 - RNA, 19 nt, synthetic construct
  source 1..19: mol_type = other RNA; note = RTT
gcagaatttgttcactgag

SEQ ID NO: 5828 - RNA, 20 nt, synthetic construct
  source 1..20: mol_type = other RNA; note = RTT
tgcagaatttgttcactgag

SEQ ID NO: 5829 - RNA, 21 nt, synthetic construct
  source 1..21: mol_type = other RNA; note = RTT
ttgcagaatttgttcactgag

SEQ ID NO: 5830 - RNA, 22 nt, synthetic construct
  source 1..22: mol_type = other RNA; note = RTT
attgcagaatttgttcactgag

SEQ ID NO: 5831 - RNA, 23 nt, synthetic construct
  source 1..23: mol_type = other RNA; note = RTT
gattgcagaatttgttcactgag

SEQ ID NO: 5832 - RNA, 24 nt, synthetic construct
  source 1..24: mol_type = other RNA; note = RTT
ggattgcagaatttgttcactgag

SEQ ID NO: 5833 - RNA, 25 nt, synthetic construct
  source 1..25: mol_type = other RNA; note = RTT
aggattgcagaatttgttcactgag

SEQ ID NO: 5834 - RNA, 26 nt, synthetic construct
  source 1..26: mol_type = other RNA; note = RTT
gaggattgcagaatttgttcactgag

SEQ ID NO: 5835 - RNA, 27 nt, synthetic construct
  source 1..27: mol_type = other RNA; note = RTT
tgaggattgcagaatttgttcactgag

SEQ ID NO: 5836 - RNA, 28 nt, synthetic construct
  source 1..28: mol_type = other RNA; note = RTT
gtgaggattgcagaatttgttcactgag

SEQ ID NO: 5837 - RNA, 29 nt, synthetic construct
  source 1..29: mol_type = other RNA; note = RTT
agtgaggattgcagaatttgttcactgag

SEQ ID NO: 5838 - RNA, 30 nt, synthetic construct
  source 1..30: mol_type = other RNA; note = RTT
gagtgaggattgcagaatttgttcactgag

SEQ ID NO: 5839 - RNA, 31 nt, synthetic construct
  source 1..31: mol_type = other RNA; note = RTT
agagtgaggattgcagaatttgttcactgag

SEQ ID NO: 5840 - RNA, 32 nt, synthetic construct
  source 1..32: mol_type = other RNA; note = RTT
cagagtgaggattgcagaatttgttcactgag

SEQ ID NO: 5841 - RNA, 33 nt, synthetic construct
  source 1..33: mol_type = other RNA; note = RTT
ccagagtgaggattgcagaatttgttcactgag

SEQ ID NO: 5842 - RNA, 34 nt, synthetic construct
  source 1..34: mol_type = other RNA; note = RTT
cccagagtgaggattgcagaatttgttcactgag

SEQ ID NO: 5843 - RNA, 35 nt, synthetic construct
  source 1..35: mol_type = other RNA; note = RTT
gcccagagtgaggattgcagaatttgttcactgag

SEQ ID NO: 5844 - RNA, 36 nt, synthetic construct
  source 1..36: mol_type = other RNA; note = RTT
tgcccagagtgaggattgcagaatttgttcactgag

SEQ ID NO: 5845 - RNA, 37 nt, synthetic construct
  source 1..37: mol_type = other RNA; note = RTT
ctgcccagagtgaggattgcagaatttgttcactgag

SEQ ID NO: 5846 - RNA, 38 nt, synthetic construct
  source 1..38: mol_type = other RNA; note = RTT
actgcccagagtgaggattgcagaatttgttcactgag

SEQ ID NO: 5847 - RNA, 39 nt, synthetic construct
  source 1..39: mol_type = other RNA; note = RTT
cactgcccagagtgaggattgcagaatttgttcactgag

SEQ ID NO: 5848 - RNA, 40 nt, synthetic construct
  source 1..40: mol_type = other RNA; note = RTT
acactgcccagagtgaggattgcagaatttgttcactgag

SEQ ID NO: 5849-5853 - skipped (5 entries)

SEQ ID NO: 5854 - RNA, 10 nt, synthetic construct
  source 1..10: mol_type = other RNA; note = PBS
aggttacact

SEQ ID NO: 5855 - RNA, 11 nt, synthetic construct
  source 1..11: mol_type = other RNA; note = PBS
aggttacactg

SEQ ID NO: 5856 - RNA, 12 nt, synthetic construct
  source 1..12: mol_type = other RNA; note = PBS
aggttacactgg

SEQ ID NO: 5857 - RNA, 13 nt, synthetic construct
  source 1..13: mol_type = other RNA; note = PBS
aggttacactggc

SEQ ID NO: 5858 - RNA, 14 nt, synthetic construct
  source 1..14: mol_type = other RNA; note = PBS
aggttacactggca

SEQ ID NO: 5859 - RNA, 15 nt, synthetic construct
  source 1..15: mol_type = other RNA; note = PBS
aggttacactggcag

SEQ ID NO: 5860 - RNA, 16 nt, synthetic construct
  source 1..16: mol_type = other RNA; note = PBS
aggttacactggcagg

SEQ ID NO: 5861 - RNA, 17 nt, synthetic construct
  source 1..17: mol_type = other RNA; note = PBS
aggttacactggcaggg

SEQ ID NO: 5862 - RNA, 18 nt, synthetic construct
  source 1..18: mol_type = other RNA; note = PBS
aggttacactggcagggc

SEQ ID NO: 5863 - RNA, 19 nt, synthetic construct
  source 1..19: mol_type = other RNA; note = PBS
aggttacactggcagggct

SEQ ID NO: 5864 - RNA, 17 nt, synthetic construct
  source 1..17: mol_type = other RNA; note = PEgRNA spacer (TG;TGG PAM)
tgccagtgtaacctcca

SEQ ID NO: 5865 - RNA, 18 nt, synthetic construct
  source 1..18: mol_type = other RNA; note = PEgRNA spacer (TG;TGG PAM)
ctgccagtgtaacctcca

SEQ ID NO: 5866 - RNA, 19 nt, synthetic construct
  source 1..19: mol_type = other RNA; note = PEgRNA spacer (TG;TGG PAM)
cctgccagtgtaacctcca

SEQ ID NO: 5867 - RNA, 21 nt, synthetic construct
  source 1..21: mol_type = other RNA; note = PEgRNA spacer (TG;TGG PAM)
gccctgccagtgtaacctcca

SEQ ID NO: 5868 - RNA, 22 nt, synthetic construct
  source 1..22: mol_type = other RNA; note = PEgRNA spacer (TG;TGG PAM)
agccctgccagtgtaacctcca

SEQ ID NO: 5869 - RNA, 25 nt, synthetic construct
  source 1..25: mol_type = other RNA; note = RTT
gcagaatttgttcactgagccatgg

SEQ ID NO: 5870 - RNA, 26 nt, synthetic construct
  source 1..26: mol_type = other RNA; note = RTT
tgcagaatttgttcactgagccatgg

SEQ ID NO: 5871 - RNA, 27 nt, synthetic construct
  source 1..27: mol_type = other RNA; note = RTT
ttgcagaatttgttcactgagccatgg

SEQ ID NO: 5872 - RNA, 28 nt, synthetic construct
  source 1..28: mol_type = other RNA; note = RTT
attgcagaatttgttcactgagccatgg

SEQ ID NO: 5873 - RNA, 29 nt, synthetic construct
  source 1..29: mol_type = other RNA; note = RTT
gattgcagaatttgttcactgagccatgg

SEQ ID NO: 5874 - RNA, 30 nt, synthetic construct
  source 1..30: mol_type = other RNA; note = RTT
ggattgcagaatttgttcactgagccatgg

SEQ ID NO: 5875 - RNA, 31 nt, synthetic construct
  source 1..31: mol_type = other RNA; note = RTT
aggattgcagaatttgttcactgagccatgg

SEQ ID NO: 5876 - RNA, 32 nt, synthetic construct
  source 1..32: mol_type = other RNA; note = RTT
gaggattgcagaatttgttcactgagccatgg

SEQ ID NO: 5877 - RNA, 33 nt, synthetic construct
  source 1..33: mol_type = other RNA; note = RTT
tgaggattgcagaatttgttcactgagccatgg

SEQ ID NO: 5878 - RNA, 34 nt, synthetic construct
  source 1..34: mol_type = other RNA; note = RTT
gtgaggattgcagaatttgttcactgagccatgg

SEQ ID NO: 5879 - RNA, 35 nt, synthetic construct
  source 1..35: mol_type = other RNA; note = RTT
agtgaggattgcagaatttgttcactgagccatgg

SEQ ID NO: 5880 - RNA, 36 nt, synthetic construct
  source 1..36: mol_type = other RNA; note = RTT
gagtgaggattgcagaatttgttcactgagccatgg

SEQ ID NO: 5881 - RNA, 37 nt, synthetic construct
  source 1..37: mol_type = other RNA; note = RTT
agagtgaggattgcagaatttgttcactgagccatgg

SEQ ID NO: 5882 - RNA, 38 nt, synthetic construct
  source 1..38: mol_type = other RNA; note = RTT
cagagtgaggattgcagaatttgttcactgagccatgg

SEQ ID NO: 5883 - RNA, 39 nt, synthetic construct
  source 1..39: mol_type = other RNA; note = RTT
ccagagtgaggattgcagaatttgttcactgagccatgg

SEQ ID NO: 5884 - RNA, 40 nt, synthetic construct
  source 1..40: mol_type = other RNA; note = RTT
cccagagtgaggattgcagaatttgttcactgagccatgg

SEQ ID NO: 5885 - RNA, 132 nt, synthetic construct
  source 1..132: mol_type = other RNA; note = pegRNA
ccctgccagtgtaacctccagttttagagctagaaatagcaagttaaaataaggctagtccgttatcaacttgaaaaagtggcaccgagtcggtgcattgcagaatttgttcactgagccatggaggttaca

SEQ ID NO: 5886 - RNA, 134 nt, synthetic construct
  source 1..134: mol_type = other RNA; note = pegRNA
ccctgccagtgtaacctccagttttagagctagaaatagcaagttaaaataaggctagtccgttatcaacttgaaaaagtggcaccgagtcggtgcattgcagaatttgttcactgagccatggaggttacact

SEQ ID NO: 5887 - RNA, 134 nt, synthetic construct
  source 1..134: mol_type = other RNA; note = pegRNA
ccctgccagtgtaacctccagttttagagctagaaatagcaagttaaaataaggctagtccgttatcaacttgaaaaagtggcaccgagtcggtgcggattgcagaatttgttcactgagccatggaggttaca

SEQ ID NO: 5888 - RNA, 136 nt, synthetic construct
  source 1..136: mol_type = other RNA; note = pegRNA
ccctgccagtgtaacctccagttttagagctagaaatagcaagttaaaataaggctagtccgttatcaacttgaaaaagtggcaccgagtcggtgcattgcagaatttgttcactgagccatggaggttacactgg

SEQ ID NO: 5889 - RNA, 136 nt, synthetic construct
  source 1..136: mol_type = other RNA; note = pegRNA
ccctgccagtgtaacctccagttttagagctagaaatagcaagttaaaataaggctagtccgttatcaacttgaaaaagtggcaccgagtcggtgcattgcagaatttgttcactgagccatggaggttacatttt

SEQ ID NO: 5890 - RNA, 136 nt, synthetic construct
  source 1..136: mol_type = other RNA; note = pegRNA
ccctgccagtgtaacctccagttttagagctagaaatagcaagttaaaataaggctagtccgttatcaacttgaaaaagtggcaccgagtcggtgcgaggattgcagaatttgttcactgagccatggaggttaca

SEQ ID NO: 5891 - RNA, 136 nt, synthetic construct
  source 1..136: mol_type = other RNA; note = pegRNA
ccctgccagtgtaacctccagttttagagctagaaatagcaagttaaaataaggctagtccgttatcaacttgaaaaagtggcaccgagtcggtgcggattgcagaatttgttcactgagccatggaggttacact

SEQ ID NO: 5892 - RNA, 138 nt, synthetic construct
  source 1..138: mol_type = other RNA; note = pegRNA
ccctgccagtgtaacctccagttttagagctagaaatagcaagttaaaataaggctagtccgttatcaacttgaaaaagtggcaccgagtcggtgcattgcagaatttgttcactgagccatggaggttacactggca

SEQ ID NO: 5893 - RNA, 138 nt, synthetic construct
  source 1..138: mol_type = other RNA; note = pegRNA
ccctgccagtgtaacctccagttttagagctagaaatagcaagttaaaataaggctagtccgttatcaacttgaaaaagtggcaccgagtcggtgcattgcagaatttgttcactgagccatggaggttacacttttt

SEQ ID NO: 5894 - RNA, 138 nt, synthetic construct
  source 1..138: mol_type = other RNA; note = pegRNA
ccctgccagtgtaacctccagttttagagctagaaatagcaagttaaaataaggctagtccgttatcaacttgaaaaagtggcaccgagtcggtgcgaggattgcagaatttgttcactgagccatggaggttacact

SEQ ID NO: 5895 - RNA, 138 nt, synthetic construct
  source 1..138: mol_type = other RNA; note = pegRNA
ccctgccagtgtaacctccagttttagagctagaaatagcaagttaaaataaggctagtccgttatcaacttgaaaaagtggcaccgagtcggtgcggattgcagaatttgttcactgagccatggaggttacactgg

SEQ ID NO: 5896 - RNA, 138 nt, synthetic construct
  source 1..138: mol_type = other RNA; note = pegRNA
ccctgccagtgtaacctccagttttagagctagaaatagcaagttaaaataaggctagtccgttatcaacttgaaaaagtggcaccgagtcggtgcggattgcagaatttgttcactgagccatggaggttacatttt

SEQ ID NO: 5897 - RNA, 138 nt, synthetic construct
  source 1..138: mol_type = other RNA; note = pegRNA
ccctgccagtgtaacctccagttttagagctagaaatagcaagttaaaataaggctagtccgttatcaacttgaaaaagtggcaccgagtcggtgcgtgaggattgcagaatttgttcactgagccatggaggttaca

SEQ ID NO: 5898 - RNA, 140 nt, synthetic construct
  source 1..140: mol_type = other RNA; note = pegRNA
ccctgccagtgtaacctccagttttagagctagaaatagcaagttaaaataaggctagtccgttatcaacttgaaaaagtggcaccgagtcggtgcattgcagaatttgttcactgagccatggaggttacactggtttt

SEQ ID NO: 5899 - RNA, 140 nt, synthetic construct
  source 1..140: mol_type = other RNA; note = pegRNA
ccctgccagtgtaacctccagttttagagctagaaatagcaagttaaaataaggctagtccgttatcaacttgaaaaagtggcaccgagtcggtgcgaggattgcagaatttgttcactgagccatggaggttacactgg

SEQ ID NO: 5900 - RNA, 140 nt, synthetic construct
  source 1..140: mol_type = other RNA; note = pegRNA
ccctgccagtgtaacctccagttttagagctagaaatagcaagttaaaataaggctagtccgttatcaacttgaaaaagtggcaccgagtcggtgcgaggattgcagaatttgttcactgagccatggaggttacatttt

SEQ ID NO: 5901 - RNA, 140 nt, synthetic construct
  source 1..140: mol_type = other RNA; note = pegRNA
ccctgccagtgtaacctccagttttagagctagaaatagcaagttaaaataaggctagtccgttatcaacttgaaaaagtggcaccgagtcggtgcggattgcagaatttgttcactgagccatggaggttacactggca

SEQ ID NO: 5902 - RNA, 140 nt, synthetic construct
  source 1..140: mol_type = other RNA; note = pegRNA
ccctgccagtgtaacctccagttttagagctagaaatagcaagttaaaataaggctagtccgttatcaacttgaaaaagtggcaccgagtcggtgcggattgcagaatttgttcactgagccatggaggttacacttttt

SEQ ID NO: 5903 - RNA, 140 nt, synthetic construct
  source 1..140: mol_type = other RNA; note = pegRNA
ccctgccagtgtaacctccagttttagagctagaaatagcaagttaaaataaggctagtccgttatcaacttgaaaaagtggcaccgagtcggtgcgtgaggattgcagaatttgttcactgagccatggaggttacact

SEQ ID NO: 5904 - RNA, 142 nt, synthetic construct
  source 1..142: mol_type = other RNA; note = pegRNA
ccctgccagtgtaacctccagttttagagctagaaatagcaagttaaaataaggctagtccgttatcaacttgaaaaagtggcaccgagtcggtgcattgcagaatttgttcactgagccatggaggttacactggcatttt

SEQ ID NO: 5905 - RNA, 142 nt, synthetic construct
  source 1..142: mol_type = other RNA; note = pegRNA
ccctgccagtgtaacctccagttttagagctagaaatagcaagttaaaataaggctagtccgttatcaacttgaaaaagtggcaccgagtcggtgcgaggattgcagaatttgttcactgagccatggaggttacactggca

SEQ ID NO: 5906 - RNA, 142 nt, synthetic construct
  source 1..142: mol_type = other RNA; note = pegRNA
ccctgccagtgtaacctccagttttagagctagaaatagcaagttaaaataaggctagtccgttatcaacttgaaaaagtggcaccgagtcggtgcgaggattgcagaatttgttcactgagccatggaggttacacttttt

SEQ ID NO: 5907 - RNA, 142 nt, synthetic construct
  source 1..142: mol_type = other RNA; note = pegRNA
ccctgccagtgtaacctccagttttagagctagaaatagcaagttaaaataaggctagtccgttatcaacttgaaaaagtggcaccgagtcggtgcggattgcagaatttgttcactgagccatggaggttacactggtttt

SEQ ID NO: 5908 - RNA, 142 nt, synthetic construct
  source 1..142: mol_type = other RNA; note = pegRNA
ccctgccagtgtaacctccagttttagagctagaaatagcaagttaaaataaggctagtccgttatcaacttgaaaaagtggcaccgagtcggtgcgtgaggattgcagaatttgttcactgagccatggaggttacactgg

SEQ ID NO: 5909 - RNA, 142 nt, synthetic construct
  source 1..142: mol_type = other RNA; note = pegRNA
ccctgccagtgtaacctccagttttagagctagaaatagcaagttaaaataaggctagtccgttatcaacttgaaaaagtggcaccgagtcggtgcgtgaggattgcagaatttgttcactgagccatggaggttacatttt

SEQ ID NO: 5910 - RNA, 144 nt, synthetic construct
  source 1..144: mol_type = other RNA; note = pegRNA
ccctgccagtgtaacctccagttttagagctagaaatagcaagttaaaataaggctagtccgttatcaacttgaaaaagtggcaccgagtcggtgcgaggattgcagaatttgttcactgagccatggaggttacactggtttt

SEQ ID NO: 5911 - RNA, 144 nt, synthetic construct
  source 1..144: mol_type = other RNA; note = pegRNA
ccctgccagtgtaacctccagttttagagctagaaatagcaagttaaaataaggctagtccgttatcaacttgaaaaagtggcaccgagtcggtgcggattgcagaatttgttcactgagccatggaggttacactggcatttt

SEQ ID NO: 5912 - RNA, 144 nt, synthetic construct
  source 1..144: mol_type = other RNA; note = pegRNA
ccctgccagtgtaacctccagttttagagctagaaatagcaagttaaaataaggctagtccgttatcaacttgaaaaagtggcaccgagtcggtgcgtgaggattgcagaatttgttcactgagccatggaggttacactggca

SEQ ID NO: 5913 - RNA, 144 nt, synthetic construct
  source 1..144: mol_type = other RNA; note = pegRNA
ccctgccagtgtaacctccagttttagagctagaaatagcaagttaaaataaggctagtccgttatcaacttgaaaaagtggcaccgagtcggtgcgtgaggattgcagaatttgttcactgagccatggaggttacacttttt

SEQ ID NO: 5914 - RNA, 146 nt, synthetic construct
  source 1..146: mol_type = other RNA; note = pegRNA
ccctgccagtgtaacctccagttttagagctagaaatagcaagttaaaataaggctagtccgttatcaacttgaaaaagtggcaccgagtcggtgcgaggattgcagaatttgttcactgagccatggaggttacactggcatttt

SEQ ID NO: 5915 - RNA, 146 nt, synthetic construct
  source 1..146: mol_type = other RNA; note = pegRNA
ccctgccagtgtaacctccagttttagagctagaaatagcaagttaaaataaggctagtccgttatcaacttgaaaaagtggcaccgagtcggtgcgtgaggattgcagaatttgttcactgagccatggaggttacactggtttt

SEQ ID NO: 5916 - RNA, 148 nt, synthetic construct
  source 1..148: mol_type = other RNA; note = pegRNA
ccctgccagtgtaacctccagttttagagctagaaatagcaagttaaaataaggctagtccgttatcaacttgaaaaagtggcaccgagtcggtgcgtgaggattgcagaatttgttcactgagccatggaggttacactggcatttt

SEQ ID NO: 5917-5921 - skipped (5 entries)

SEQ ID NO: 5922 - RNA, 10 nt, synthetic construct
  source 1..10: mol_type = other RNA; note = PBS
cccagagtga

SEQ ID NO: 5923 - RNA, 11 nt, synthetic construct
  source 1..11: mol_type = other RNA; note = PBS
cccagagtgag

SEQ ID NO: 5924 - RNA, 12 nt, synthetic construct
  source 1..12: mol_type = other RNA; note = PBS
cccagagtgagg

SEQ ID NO: 5925 - RNA, 13 nt, synthetic construct
  source 1..13: mol_type = other RNA; note = PBS
cccagagtgagga

SEQ ID NO: 5926 - RNA, 14 nt, synthetic construct
  source 1..14: mol_type = other RNA; note = PBS
cccagagtgaggat

SEQ ID NO: 5927 - RNA, 15 nt, synthetic construct
  source 1..15: mol_type = other RNA; note = PBS
cccagagtgaggatt

SEQ ID NO: 5928 - RNA, 16 nt, synthetic construct
  source 1..16: mol_type = other RNA; note = PBS
cccagagtgaggattg

SEQ ID NO: 5929 - RNA, 17 nt, synthetic construct
  source 1..17: mol_type = other RNA; note = PBS
cccagagtgaggattgc

SEQ ID NO: 5930 - RNA, 18 nt, synthetic construct
  source 1..18: mol_type = other RNA; note = PBS
cccagagtgaggattgca

SEQ ID NO: 5931 - RNA, 19 nt, synthetic construct
  source 1..19: mol_type = other RNA; note = PBS
cccagagtgaggattgcag

SEQ ID NO: 5932 - RNA, 18 nt, synthetic construct
  source 1..18: mol_type = other RNA; note = PEgRNA spacer (TG;TGTAGT PAM)
aatcctcactctgggcag

SEQ ID NO: 5933 - RNA, 19 nt, synthetic construct
  source 1..19: mol_type = other RNA; note = PEgRNA spacer (TG;TGTAGT PAM)
caatcctcactctgggcag

SEQ ID NO: 5934 - RNA, 21 nt, synthetic construct
  source 1..21: mol_type = other RNA; note = PEgRNA spacer (TG;TGTAGT PAM)
tgcaatcctcactctgggcag

SEQ ID NO: 5935 - RNA, 22 nt, synthetic construct
  source 1..22: mol_type = other RNA; note = PEgRNA spacer (TG;TGTAGT PAM)
ctgcaatcctcactctgggcag

SEQ ID NO: 5936 - RNA, 10 nt, synthetic construct
  source 1..10: mol_type = other RNA; note = RTT
actcacactg

SEQ ID NO: 5937 - RNA, 11 nt, synthetic construct
  source 1..11: mol_type = other RNA; note = RTT
cactcacactg

SEQ ID NO: 5938 - RNA, 12 nt, synthetic construct
  source 1..12: mol_type = other RNA; note = RTT
gcactcacactg

SEQ ID NO: 5939 - RNA, 13 nt, synthetic construct
  source 1..13: mol_type = other RNA; note = RTT
tgcactcacactg

SEQ ID NO: 5940 - RNA, 14 nt, synthetic construct
  source 1..14: mol_type = other RNA; note = RTT
ttgcactcacactg

SEQ ID NO: 5941 - RNA, 15 nt, synthetic construct
  source 1..15: mol_type = other RNA; note = RTT
tttgcactcacactg

SEQ ID NO: 5942 - RNA, 16 nt, synthetic construct
  source 1..16: mol_type = other RNA; note = RTT
ttttgcactcacactg

SEQ ID NO: 5943 - RNA, 17 nt, synthetic construct
  source 1..17: mol_type = other RNA; note = RTT
tttttgcactcacactg

SEQ ID NO: 5944 - RNA, 18 nt, synthetic construct
  source 1..18: mol_type = other RNA; note = RTT
ttttttgcactcacactg

SEQ ID NO: 5945 - RNA, 19 nt, synthetic construct
  source 1..19: mol_type = other RNA; note = RTT
cttttttgcactcacactg

SEQ ID NO: 5946 - RNA, 20 nt, synthetic construct
  source 1..20: mol_type = other RNA; note = RTT
tcttttttgcactcacactg

SEQ ID NO: 5947 - RNA, 21 nt, synthetic construct
  source 1..21: mol_type = other RNA; note = RTT
ttcttttttgcactcacactg

SEQ ID NO: 5948 - RNA, 22 nt, synthetic construct
  source 1..22: mol_type = other RNA; note = RTT
cttcttttttgcactcacactg

SEQ ID NO: 5949 - RNA, 23 nt, synthetic construct
  source 1..23: mol_type = other RNA; note = RTT
gcttcttttttgcactcacactg

SEQ ID NO: 5950 - RNA, 24 nt, synthetic construct
  source 1..24: mol_type = other RNA; note = RTT
ggcttcttttttgcactcacactg

SEQ ID NO: 5951 - RNA, 25 nt, synthetic construct
  source 1..25: mol_type = other RNA; note = RTT
tggcttcttttttgcactcacactg

SEQ ID NO: 5952 - RNA, 26 nt, synthetic construct
  source 1..26: mol_type = other RNA; note = RTT
ttggcttcttttttgcactcacactg

SEQ ID NO: 5953 - RNA, 27 nt, synthetic construct
  source 1..27: mol_type = other RNA; note = RTT
tttggcttcttttttgcactcacactg

SEQ ID NO: 5954 - RNA, 28 nt, synthetic construct
  source 1..28: mol_type = other RNA; note = RTT
ctttggcttcttttttgcactcacactg

SEQ ID NO: 5955 - RNA, 29 nt, synthetic construct
  source 1..29: mol_type = other RNA; note = RTT
cctttggcttcttttttgcactcacactg

SEQ ID NO: 5956 - RNA, 30 nt, synthetic construct
  source 1..30: mol_type = other RNA; note = RTT
tcctttggcttcttttttgcactcacactg

SEQ ID NO: 5957 - RNA, 31 nt, synthetic construct
  source 1..31: mol_type = other RNA; note = RTT
gtcctttggcttcttttttgcactcacactg

SEQ ID NO: 5958 - RNA, 32 nt, synthetic construct
  source 1..32: mol_type = other RNA; note = RTT
agtcctttggcttcttttttgcactcacactg

SEQ ID NO: 5959 - RNA, 33 nt, synthetic construct
  source 1..33: mol_type = other RNA; note = RTT
aagtcctttggcttcttttttgcactcacactg

SEQ ID NO: 5960 - RNA, 34 nt, synthetic construct
  source 1..34: mol_type = other RNA; note = RTT
gaagtcctttggcttcttttttgcactcacactg

SEQ ID NO: 5961 - RNA, 35 nt, synthetic construct
  source 1..35: mol_type = other RNA; note = RTT
tgaagtcctttggcttcttttttgcactcacactg

SEQ ID NO: 5962 - RNA, 36 nt, synthetic construct
  source 1..36: mol_type = other RNA; note = RTT
ctgaagtcctttggcttcttttttgcactcacactg

SEQ ID NO: 5963 - RNA, 37 nt, synthetic construct
  source 1..37: mol_type = other RNA; note = RTT
actgaagtcctttggcttcttttttgcactcacactg

SEQ ID NO: 5964 - RNA, 38 nt, synthetic construct
  source 1..38: mol_type = other RNA; note = RTT
cactgaagtcctttggcttcttttttgcactcacactg

SEQ ID NO: 5965 - RNA, 39 nt, synthetic construct
  source 1..39: mol_type = other RNA; note = RTT
acactgaagtcctttggcttcttttttgcactcacactg

SEQ ID NO: 5966 - RNA, 40 nt, synthetic construct
  source 1..40: mol_type = other RNA; note = RTT
cacactgaagtcctttggcttcttttttgcactcacactg

SEQ ID NO: 5967 - RNA, 96 nt, synthetic construct
  source 1..96: mol_type = other RNA; note = ngRNA
acagtcacaggccttacaatgttttagagctagaaatagcaagttaaaataaggctagtccgttatcaacttgaaaaagtggcaccgagtcggtgc

SEQ ID NO: 5968 - RNA, 96 nt, synthetic construct
  source 1..96: mol_type = other RNA; note = ngRNA
tccagctgtgtcacagtcacgttttagagctagaaatagcaagttaaaataaggctagtccgttatcaacttgaaaaagtggcaccgagtcggtgc

SEQ ID NO: 5969 - RNA, 100 nt, synthetic construct
  source 1..100: mol_type = other RNA; note = ngRNA
acagtcacaggccttacaatgttttagagctagaaatagcaagttaaaataaggctagtccgttatcaacttgaaaaagtggcaccgagtcggtgctttt

SEQ ID NO: 5970 - RNA, 100 nt, synthetic construct
  source 1..100: mol_type = other RNA; note = ngRNA
tccagctgtgtcacagtcacgttttagagctagaaatagcaagttaaaataaggctagtccgttatcaacttgaaaaagtggcaccgagtcggtgctttt

SEQ ID NO: 5971 - RNA, 20 nt, synthetic construct
  source 1..20: mol_type = other RNA; note = PE3 ngRNA spacer (TG PAM)
acagtcacaggccttacaat

SEQ ID NO: 5972 - RNA, 20 nt, synthetic construct
  source 1..20: mol_type = other RNA; note = PE3 ngRNA spacer (GG PAM)
cagtcacaggccttacaatt

SEQ ID NO: 5973 - RNA, 20 nt, synthetic construct
  source 1..20: mol_type = other RNA; note = PE3 ngRNA spacer (TG PAM)
gtcacaggccttacaattgg

SEQ ID NO: 5974 - RNA, 20 nt, synthetic construct
  source 1..20: mol_type = other RNA; note = PE3 ngRNA spacer (ATTGGT PAM)
tcacagtcacaggccttaca

SEQ ID NO: 5975 - RNA, 20 nt, synthetic construct
  source 1..20: mol_type = other RNA; note = PE3 ngRNA spacer (AG PAM)
tccagctgtgtcacagtcac

SEQ ID NO: 5976-5980 - skipped (5 entries)

SEQ ID NO: 5981 - RNA, 10 nt, synthetic construct
  source 1..10: mol_type = other RNA; note = PBS
gaggttacac

SEQ ID NO: 5982 - RNA, 11 nt, synthetic construct
  source 1..11: mol_type = other RNA; note = PBS
gaggttacact

SEQ ID NO: 5983 - RNA, 12 nt, synthetic construct
  source 1..12: mol_type = other RNA; note = PBS
gaggttacactg

SEQ ID NO: 5984 - RNA, 13 nt, synthetic construct
  source 1..13: mol_type = other RNA; note = PBS
gaggttacactgg

SEQ ID NO: 5985 - RNA, 14 nt, synthetic construct
  source 1..14: mol_type = other RNA; note = PBS
gaggttacactggc

SEQ ID NO: 5986 - RNA, 15 nt, synthetic construct
  source 1..15: mol_type = other RNA; note = PBS
gaggttacactggca

SEQ ID NO: 5987 - RNA, 16 nt, synthetic construct
  source 1..16: mol_type = other RNA; note = PBS
gaggttacactggcag

SEQ ID NO: 5988 - RNA, 17 nt, synthetic construct
  source 1..17: mol_type = other RNA; note = PBS
gaggttacactggcagg

SEQ ID NO: 5989 - RNA, 18 nt, synthetic construct
  source 1..18: mol_type = other RNA; note = PBS
gaggttacactggcaggg

SEQ ID NO: 5990 - RNA, 19 nt, synthetic construct
  source 1..19: mol_type = other RNA; note = PBS
gaggttacactggcagggc

SEQ ID NO: 5991 - RNA, 17 nt, synthetic construct
  source 1..17: mol_type = other RNA; note = PEgRNA spacer (GG PAM)
gccagtgtaacctccat

SEQ ID NO: 5992 - RNA, 18 nt, synthetic construct
  source 1..18: mol_type = other RNA; note = PEgRNA spacer (GG PAM)
tgccagtgtaacctccat

SEQ ID NO: 5993 - RNA, 19 nt, synthetic construct
  source 1..19: mol_type = other RNA; note = PEgRNA spacer (GG PAM)
ctgccagtgtaacctccat

SEQ ID NO: 5994 - RNA, 21 nt, synthetic construct
  source 1..21: mol_type = other RNA; note = PEgRNA spacer (GG PAM)
ccctgccagtgtaacctccat

SEQ ID NO: 5995 - RNA, 22 nt, synthetic construct
  source 1..22: mol_type = other RNA; note = PEgRNA spacer (GG PAM)
gccctgccagtgtaacctccat

SEQ ID NO: 5996 - RNA, 24 nt, synthetic construct
  source 1..24: mol_type = other RNA; note = RTT
gcagaatttgttcactgagccatg

SEQ ID NO: 5997 - RNA, 25 nt, synthetic construct
  source 1..25: mol_type = other RNA; note = RTT
tgcagaatttgttcactgagccatg

SEQ ID NO: 5998 - RNA, 26 nt, synthetic construct
  source 1..26: mol_type = other RNA; note = RTT
ttgcagaatttgttcactgagccatg

SEQ ID NO: 5999 - RNA, 27 nt, synthetic construct
  source 1..27: mol_type = other RNA; note = RTT
attgcagaatttgttcactgagccatg

SEQ ID NO: 6000 - RNA, 28 nt, synthetic construct
  source 1..28: mol_type = other RNA; note = RTT
gattgcagaatttgttcactgagccatg

SEQ ID NO: 6001 - RNA, 29 nt, synthetic construct
  source 1..29: mol_type = other RNA; note = RTT
ggattgcagaatttgttcactgagccatg

SEQ ID NO: 6002 - RNA, 30 nt, synthetic construct
  source 1..30: mol_type = other RNA; note = RTT
aggattgcagaatttgttcactgagccatg

SEQ ID NO: 6003 - RNA, 31 nt, synthetic construct
  source 1..31: mol_type = other RNA; note = RTT
gaggattgcagaatttgttcactgagccatg

SEQ ID NO: 6004 - RNA, 32 nt, synthetic construct
  source 1..32: mol_type = other RNA; note = RTT
tgaggattgcagaatttgttcactgagccatg

SEQ ID NO: 6005 - RNA, 33 nt, synthetic construct
  source 1..33: mol_type = other RNA; note = RTT
gtgaggattgcagaatttgttcactgagccatg

SEQ ID NO: 6006 - RNA, 34 nt, synthetic construct
  source 1..34: mol_type = other RNA; note = RTT
agtgaggattgcagaatttgttcactgagccatg

SEQ ID NO: 6007 - RNA, 35 nt, synthetic construct
  source 1..35: mol_type = other RNA; note = RTT
gagtgaggattgcagaatttgttcactgagccatg

SEQ ID NO: 6008 - RNA, 36 nt, synthetic construct
  source 1..36: mol_type = other RNA; note = RTT
agagtgaggattgcagaatttgttcactgagccatg

SEQ ID NO: 6009 - RNA, 37 nt, synthetic construct
  source 1..37: mol_type = other RNA; note = RTT
cagagtgaggattgcagaatttgttcactgagccatg

SEQ ID NO: 6010 - RNA, 38 nt, synthetic construct
  source 1..38: mol_type = other RNA; note = RTT
ccagagtgaggattgcagaatttgttcactgagccatg

SEQ ID NO: 6011 - RNA, 39 nt, synthetic construct
  source 1..39: mol_type = other RNA; note = RTT
cccagagtgaggattgcagaatttgttcactgagccatg

SEQ ID NO: 6012 - RNA, 40 nt, synthetic construct
  source 1..40: mol_type = other RNA; note = RTT
gcccagagtgaggattgcagaatttgttcactgagccatg

SEQ ID NO: 6013-6017 - skipped (5 entries)

SEQ ID NO: 6018 - RNA, 10 nt, synthetic construct
  source 1..10: mol_type = other RNA; note = PBS
gtgaggattg

SEQ ID NO: 6019 - RNA, 11 nt, synthetic construct
  source 1..11: mol_type = other RNA; note = PBS
gtgaggattgc

SEQ ID NO: 6020 - RNA, 12 nt, synthetic construct
  source 1..12: mol_type = other RNA; note = PBS
gtgaggattgca

SEQ ID NO: 6021 - RNA, 13 nt, synthetic construct
  source 1..13: mol_type = other RNA; note = PBS
gtgaggattgcag

SEQ ID NO: 6022 - RNA, 14 nt, synthetic construct
  source 1..14: mol_type = other RNA; note = PBS
gtgaggattgcaga

SEQ ID NO: 6023 - RNA, 16 nt, synthetic construct
  source 1..16: mol_type = other RNA; note = PBS
gtgaggattgcagaat

SEQ ID NO: 6024 - RNA, 17 nt, synthetic construct
  source 1..17: mol_type = other RNA; note = PBS
gtgaggattgcagaatt

SEQ ID NO: 6025 - RNA, 18 nt, synthetic construct
  source 1..18: mol_type = other RNA; note = PBS
gtgaggattgcagaattt

SEQ ID NO: 6026 - RNA, 19 nt, synthetic construct
  source 1..19: mol_type = other RNA; note = PBS
gtgaggattgcagaatttg

SEQ ID NO: 6027 - RNA, 17 nt, synthetic construct
  source 1..17: mol_type = other RNA; note = PEgRNA spacer (GG;GGG PAM)
tctgcaatcctcactct

SEQ ID NO: 6028 - RNA, 18 nt, synthetic construct
  source 1..18: mol_type = other RNA; note = PEgRNA spacer (GG;GGG PAM)
ttctgcaatcctcactct

SEQ ID NO: 6029 - RNA, 19 nt, synthetic construct
  source 1..19: mol_type = other RNA; note = PEgRNA spacer (GG;GGG PAM)
attctgcaatcctcactct

SEQ ID NO: 6030 - RNA, 21 nt, synthetic construct
  source 1..21: mol_type = other RNA; note = PEgRNA spacer (GG;GGG PAM)
aaattctgcaatcctcactct

SEQ ID NO: 6031 - RNA, 22 nt, synthetic construct
  source 1..22: mol_type = other RNA; note = PEgRNA spacer (GG;GGG PAM)
caaattctgcaatcctcactct

SEQ ID NO: 6032 - RNA, 14 nt, synthetic construct
  source 1..14: mol_type = other RNA; note = RTT*2,5,6,7,8
tcacactgcccaga

SEQ ID NO: 6033 - RNA, 14 nt, synthetic construct
  source 1..14: mol_type = other RNA; note = RTT*3 (GGG-to-GGC PAM silencing edit)
tcacactggccaga

SEQ ID NO: 6034 - RNA, 15 nt, synthetic construct
  source 1..15: mol_type = other RNA; note = RTT*2,5,6,7,8
ctcacactgcccaga

SEQ ID NO: 6035 - RNA, 15 nt, synthetic construct
  source 1..15: mol_type = other RNA; note = RTT*3 (GGG-to-GGC PAM silencing edit)
ctcacactggccaga

SEQ ID NO: 6036 - RNA, 16 nt, synthetic construct
  source 1..16: mol_type = other RNA; note = RTT*2,5,6,7,8
actcacactgcccaga

SEQ ID NO: 6037 - RNA, 16 nt, synthetic construct
  source 1..16: mol_type = other RNA; note = RTT*3 (GGG-to-GGC PAM silencing edit)
actcacactggccaga

SEQ ID NO: 6038 - RNA, 17 nt, synthetic construct
  source 1..17: mol_type = other RNA; note = RTT*1 (GGG-to-GGT PAM silencing edit)
cactcacactgaccaga

SEQ ID NO: 6039 - RNA, 17 nt, synthetic construct
  source 1..17: mol_type = other RNA; note = RTT*2,5,6,7,8
cactcacactgcccaga

SEQ ID NO: 6040 - RNA, 17 nt, synthetic construct
  source 1..17: mol_type = other RNA; note = RTT*3 (GGG-to-GGC PAM silencing edit)
cactcacactggccaga

SEQ ID NO: 6041 - RNA, 17 nt, synthetic construct
  source 1..17: mol_type = other RNA; note = RTT*4 (GGG-to-GGA PAM silencing edit)
cactcacactgtccaga

SEQ ID NO: 6042 - RNA, 18 nt, synthetic construct
  source 1..18: mol_type = other RNA; note = RTT*1 (GGG-to-GGT PAM silencing edit)
gcactcacactgaccaga

SEQ ID NO: 6043 - RNA, 18 nt, synthetic construct
  source 1..18: mol_type = other RNA; note = RTT*2,5,6,7,8
gcactcacactgcccaga

SEQ ID NO: 6044 - RNA, 18 nt, synthetic construct
  source 1..18: mol_type = other RNA; note = RTT*3 (GGG-to-GGC PAM silencing edit)
gcactcacactggccaga

SEQ ID NO: 6045 - RNA, 18 nt, synthetic construct
  source 1..18: mol_type = other RNA; note = RTT*4 (GGG-to-GGA PAM silencing edit)
gcactcacactgtccaga

SEQ ID NO: 6046 - RNA, 19 nt, synthetic construct
  source 1..19: mol_type = other RNA; note = RTT*1 (GGG-to-GGT PAM silencing edit)
tgcactcacactgaccaga

SEQ ID NO: 6047 - RNA, 19 nt, synthetic construct
  source 1..19: mol_type = other RNA; note = RTT*2,5,6,7,8
tgcactcacactgcccaga

SEQ ID NO: 6048 - RNA, 19 nt, synthetic construct
  source 1..19: mol_type = other RNA; note = RTT*3 (GGG-to-GGC PAM silencing edit)
tgcactcacactggccaga

SEQ ID NO: 6049 - RNA, 19 nt, synthetic construct
  source 1..19: mol_type = other RNA; note = RTT*4 (GGG-to-GGA PAM silencing edit)
tgcactcacactgtccaga

SEQ ID NO: 6050 - RNA, 20 nt, synthetic construct
  source 1..20: mol_type = other RNA; note = RTT*1 (GGG-to-GGT PAM silencing edit)
ttgcactcacactgaccaga

SEQ ID NO: 6051 - RNA, 20 nt, synthetic construct
  source 1..20: mol_type = other RNA; note = RTT*2,5,6,7,8
ttgcactcacactgcccaga

SEQ ID NO: 6052 - RNA, 20 nt, synthetic construct
  source 1..20: mol_type = other RNA; note = RTT*3 (GGG-to-GGC PAM silencing edit)
ttgcactcacactggccaga

SEQ ID NO: 6053 - RNA, 20 nt, synthetic construct
  source 1..20: mol_type = other RNA; note = RTT*4 (GGG-to-GGA PAM silencing edit)
ttgcactcacactgtccaga

SEQ ID NO: 6054 - RNA, 21 nt, synthetic construct
  source 1..21: mol_type = other RNA; note = RTT*1 (GGG-to-GGT PAM silencing edit)
tttgcactcacactgaccaga

SEQ ID NO: 6055 - RNA, 21 nt, synthetic construct
  source 1..21: mol_type = other RNA; note = RTT*2,5,6,7,8
tttgcactcacactgcccaga

SEQ ID NO: 6056 - RNA, 21 nt, synthetic construct
  source 1..21: mol_type = other RNA; note = RTT*3 (GGG-to-GGC PAM silencing edit)
tttgcactcacactggccaga

SEQ ID NO: 6057 - RNA, 21 nt, synthetic construct
  source 1..21: mol_type = other RNA; note = RTT*4 (GGG-to-GGA PAM silencing edit)
tttgcactcacactgtccaga

SEQ ID NO: 6058 - RNA, 22 nt, synthetic construct
  source 1..22: mol_type = other RNA; note = RTT*1 (GGG-to-GGT PAM silencing edit)
ttttgcactcacactgaccaga

SEQ ID NO: 6059 - RNA, 22 nt, synthetic construct
  source 1..22: mol_type = other RNA; note = RTT*2,5,6,7,8
ttttgcactcacactgcccaga

SEQ ID NO: 6060 - RNA, 22 nt, synthetic construct
  source 1..22: mol_type = other RNA; note = RTT*3 (GGG-to-GGC PAM silencing edit)
ttttgcactcacactggccaga

SEQ ID NO: 6061 - RNA, 22 nt, synthetic construct
  source 1..22: mol_type = other RNA; note = RTT*4 (GGG-to-GGA PAM silencing edit)
ttttgcactcacactgtccaga

SEQ ID NO: 6062 - RNA, 23 nt, synthetic construct
  source 1..23: mol_type = other RNA; note = RTT*1 (GGG-to-GGT PAM silencing edit)
tttttgcactcacactgaccaga

SEQ ID NO: 6063 - RNA, 23 nt, synthetic construct
  source 1..23: mol_type = other RNA; note = RTT*2,5,6,7,8
tttttgcactcacactgcccaga

SEQ ID NO: 6064 - RNA, 23 nt, synthetic construct
  source 1..23: mol_type = other RNA; note = RTT*3 (GGG-to-GGC PAM silencing edit)
tttttgcactcacactggccaga

SEQ ID NO: 6065 - RNA, 23 nt, synthetic construct
  source 1..23: mol_type = other RNA; note = RTT*4 (GGG-to-GGA PAM silencing edit)
tttttgcactcacactgtccaga

SEQ ID NO: 6066 - RNA, 24 nt, synthetic construct
  source 1..24: mol_type = other RNA; note = RTT*1 (GGG-to-GGT PAM silencing edit)
ttttttgcactcacactgaccaga

SEQ ID NO: 6067 - RNA, 24 nt, synthetic construct
  source 1..24: mol_type = other RNA; note = RTT*2,5,6,7,8
ttttttgcactcacactgcccaga

SEQ ID NO: 6068 - RNA, 24 nt, synthetic construct
  source 1..24: mol_type = other RNA; note = RTT*3 (GGG-to-GGC PAM silencing edit)
ttttttgcactcacactggccaga

SEQ ID NO: 6069 - RNA, 24 nt, synthetic construct
  source 1..24: mol_type = other RNA; note = RTT*4 (GGG-to-GGA PAM silencing edit)
ttttttgcactcacactgtccaga

SEQ ID NO: 6070 - RNA, 25 nt, synthetic construct
  source 1..25: mol_type = other RNA; note = RTT*1 (GGG-to-GGT PAM silencing edit)
cttttttgcactcacactgaccaga

SEQ ID NO: 6071 - RNA, 25 nt, synthetic construct
  source 1..25: mol_type = other RNA; note = RTT*2,5,6,7,8
cttttttgcactcacactgcccaga

SEQ ID NO: 6072 - RNA, 25 nt, synthetic construct
  source 1..25: mol_type = other RNA; note = RTT*3 (GGG-to-GGC PAM silencing edit)
cttttttgcactcacactggccaga

SEQ ID NO: 6073 - RNA, 25 nt, synthetic construct
  source 1..25: mol_type = other RNA; note = RTT*4 (GGG-to-GGA PAM silencing edit)
cttttttgcactcacactgtccaga

SEQ ID NO: 6074 - RNA, 26 nt, synthetic construct
  source 1..26: mol_type = other RNA; note = RTT*1 (GGG-to-GGT PAM silencing edit)
tcttttttgcactcacactgaccaga

SEQ ID NO: 6075 - RNA, 26 nt, synthetic construct
  source 1..26: mol_type = other RNA; note = RTT*2,5,6,7,8
tcttttttgcactcacactgcccaga

SEQ ID NO: 6076 - RNA, 26 nt, synthetic construct
  source 1..26: mol_type = other RNA; note = RTT*3 (GGG-to-GGC PAM silencing edit)
tcttttttgcactcacactggccaga

SEQ ID NO: 6077 - RNA, 26 nt, synthetic construct
  source 1..26: mol_type = other RNA; note = RTT*4 (GGG-to-GGA PAM silencing edit)
tcttttttgcactcacactgtccaga

SEQ ID NO: 6078 - RNA, 27 nt, synthetic construct
  source 1..27: mol_type = other RNA; note = RTT*1 (GGG-to-GGT PAM silencing edit)
ttcttttttgcactcacactgaccaga

SEQ ID NO: 6079 - RNA, 27 nt, synthetic construct
  source 1..27: mol_type = other RNA; note = RTT*2,5,6,7,8
ttcttttttgcactcacactgcccaga

SEQ ID NO: 6080 - RNA, 27 nt, synthetic construct
  source 1..27: mol_type = other RNA; note = RTT*3 (GGG-to-GGC PAM silencing edit)
ttcttttttgcactcacactggccaga

SEQ ID NO: 6081 - RNA, 27 nt, synthetic construct
  source 1..27: mol_type = other RNA; note = RTT*4 (GGG-to-GGA PAM silencing edit)
ttcttttttgcactcacactgtccaga

SEQ ID NO: 6082 - RNA, 28 nt, synthetic construct
  source 1..28: mol_type = other RNA; note = RTT*1 (GGG-to-GGT PAM silencing edit)
cttcttttttgcactcacactgaccaga

SEQ ID NO: 6083 - RNA, 28 nt, synthetic construct
  source 1..28: mol_type = other RNA; note = RTT*2,5,6,7,8
cttcttttttgcactcacactgcccaga

SEQ ID NO: 6084 - RNA, 28 nt, synthetic construct
  source 1..28: mol_type = other RNA; note = RTT*3 (GGG-to-GGC PAM silencing edit)
cttcttttttgcactcacactggccaga

SEQ ID NO: 6085 - RNA, 28 nt, synthetic construct
  source 1..28: mol_type = other RNA; note = RTT*4 (GGG-to-GGA PAM silencing edit)
cttcttttttgcactcacactgtccaga

SEQ ID NO: 6086 - RNA, 29 nt, synthetic construct
  source 1..29: mol_type = other RNA; note = RTT*1 (GGG-to-GGT PAM silencing edit)
gcttcttttttgcactcacactgaccaga

SEQ ID NO: 6087 - RNA, 29 nt, synthetic construct
  source 1..29: mol_type = other RNA; note = RTT*2,5,6,7,8
gcttcttttttgcactcacactgcccaga

SEQ ID NO: 6088 - RNA, 29 nt, synthetic construct
  source 1..29: mol_type = other RNA; note = RTT*3 (GGG-to-GGC PAM silencing edit)
gcttcttttttgcactcacactggccaga

SEQ ID NO: 6089 - RNA, 29 nt, synthetic construct
  source 1..29: mol_type = other RNA; note = RTT*4 (GGG-to-GGA PAM silencing edit)
gcttcttttttgcactcacactgtccaga

SEQ ID NO: 6090 - RNA, 30 nt, synthetic construct
  source 1..30: mol_type = other RNA; note = RTT*1 (GGG-to-GGT PAM silencing edit)
ggcttcttttttgcactcacactgaccaga

SEQ ID NO: 6091 - RNA, 30 nt, synthetic construct
  source 1..30: mol_type = other RNA; note = RTT*2,5,6,7,8
ggcttcttttttgcactcacactgcccaga

SEQ ID NO: 6092 - RNA, 30 nt, synthetic construct
  source 1..30: mol_type = other RNA; note = RTT*3 (GGG-to-GGC PAM silencing edit)
ggcttcttttttgcactcacactggccaga

SEQ ID NO: 6093 - RNA, 30 nt, synthetic construct
  source 1..30: mol_type = other RNA; note = RTT*4 (GGG-to-GGA PAM silencing edit)
ggcttcttttttgcactcacactgtccaga

SEQ ID NO: 6094 - RNA, 31 nt, synthetic construct
  source 1..31: mol_type = other RNA; note = RTT*1 (GGG-to-GGT PAM silencing edit)
tggcttcttttttgcactcacactgaccaga

SEQ ID NO: 6095 - RNA, 31 nt, synthetic construct
  source 1..31: mol_type = other RNA; note = RTT*2,5,6,7,8
tggcttcttttttgcactcacactgcccaga

SEQ ID NO: 6096 - RNA, 31 nt, synthetic construct
  source 1..31: mol_type = other RNA; note = RTT*3 (GGG-to-GGC PAM silencing edit)
tggcttcttttttgcactcacactggccaga

SEQ ID NO: 6097 - RNA, 31 nt, synthetic construct
  source 1..31: mol_type = other RNA; note = RTT*4 (GGG-to-GGA PAM silencing edit)
tggcttcttttttgcactcacactgtccaga

SEQ ID NO: 6098 - RNA, 32 nt, synthetic construct
  source 1..32: mol_type = other RNA; note = RTT*1 (GGG-to-GGT PAM silencing edit)
ttggcttcttttttgcactcacactgaccaga

SEQ ID NO: 6099 - RNA, 32 nt, synthetic construct
  source 1..32: mol_type = other RNA; note = RTT*2,5,6,7,8
ttggcttcttttttgcactcacactgcccaga

SEQ ID NO: 6100 - RNA, 32 nt, synthetic construct
  source 1..32: mol_type = other RNA; note = RTT*3 (GGG-to-GGC PAM silencing edit)
ttggcttcttttttgcactcacactggccaga

SEQ ID NO: 6101 - RNA, 32 nt, synthetic construct
  source 1..32: mol_type = other RNA; note = RTT*4 (GGG-to-GGA PAM silencing edit)
ttggcttcttttttgcactcacactgtccaga

SEQ ID NO: 6102 - RNA, 33 nt, synthetic construct
  source 1..33: mol_type = other RNA; note = RTT*1 (GGG-to-GGT PAM silencing edit)
tttggcttcttttttgcactcacactgaccaga

SEQ ID NO: 6103 - RNA, 33 nt, synthetic construct
  source 1..33: mol_type = other RNA; note = RTT*2,5,6,7,8
tttggcttcttttttgcactcacactgcccaga

SEQ ID NO: 6104 - RNA, 33 nt, synthetic construct
  source 1..33: mol_type = other RNA; note = RTT*3 (GGG-to-GGC PAM silencing edit)
tttggcttcttttttgcactcacactggccaga

SEQ ID NO: 6105 - RNA, 33 nt, synthetic construct
  source 1..33: mol_type = other RNA; note = RTT*4 (GGG-to-GGA PAM silencing edit)
tttggcttcttttttgcactcacactgtccaga

SEQ ID NO: 6106 - RNA, 34 nt, synthetic construct
  source 1..34: mol_type = other RNA; note = RTT*1 (GGG-to-GGT PAM silencing edit)
ctttggcttcttttttgcactcacactgaccaga

SEQ ID NO: 6107 - RNA, 34 nt, synthetic construct
  source 1..34: mol_type = other RNA; note = RTT*2,5,6,7,8
ctttggcttcttttttgcactcacactgcccaga

SEQ ID NO: 6108 - RNA, 34 nt, synthetic construct
  source 1..34: mol_type = other RNA; note = RTT*3 (GGG-to-GGC PAM silencing edit)
ctttggcttcttttttgcactcacactggccaga

SEQ ID NO: 6109 - RNA, 34 nt, synthetic construct
  source 1..34: mol_type = other RNA; note = RTT*4 (GGG-to-GGA PAM silencing edit)
ctttggcttcttttttgcactcacactgtccaga

SEQ ID NO: 6110 - RNA, 35 nt, synthetic construct
  source 1..35: mol_type = other RNA; note = RTT*1 (GGG-to-GGT PAM silencing edit)
cctttggcttcttttttgcactcacactgaccaga

SEQ ID NO: 6111 - RNA, 35 nt, synthetic construct
  source 1..35: mol_type = other RNA; note = RTT*2,5,6,7,8
cctttggcttcttttttgcactcacactgcccaga

SEQ ID NO: 6112 - RNA, 35 nt, synthetic construct
  source 1..35: mol_type = other RNA; note = RTT*3 (GGG-to-GGC PAM silencing edit)
cctttggcttcttttttgcactcacactggccaga

SEQ ID NO: 6113 - RNA, 35 nt, synthetic construct
  source 1..35: mol_type = other RNA; note = RTT*4 (GGG-to-GGA PAM silencing edit)
cctttggcttcttttttgcactcacactgtccaga

SEQ ID NO: 6114 - RNA, 36 nt, synthetic construct
  source 1..36: mol_type = other RNA; note = RTT*1 (GGG-to-GGT PAM silencing edit)
tcctttggcttcttttttgcactcacactgaccaga

SEQ ID NO: 6115 - RNA, 36 nt, synthetic construct
  source 1..36: mol_type = other RNA; note = RTT*2,5,6,7,8
tcctttggcttcttttttgcactcacactgcccaga

SEQ ID NO: 6116 - RNA, 36 nt, synthetic construct
  source 1..36: mol_type = other RNA; note = RTT*3 (GGG-to-GGC PAM silencing edit)
tcctttggcttcttttttgcactcacactggccaga

SEQ ID NO: 6117 - RNA, 36 nt, synthetic construct
  source 1..36: mol_type = other RNA; note = RTT*4 (GGG-to-GGA PAM silencing edit)
tcctttggcttcttttttgcactcacactgtccaga

SEQ ID NO: 6118 - RNA, 37 nt, synthetic construct
  source 1..37: mol_type = other RNA; note = RTT*1 (GGG-to-GGT PAM silencing edit)
gtcctttggcttcttttttgcactcacactgaccaga

SEQ ID NO: 6119 - RNA, 37 nt, synthetic construct
  source 1..37: mol_type = other RNA; note = RTT*2,5,6,7,8
gtcctttggcttcttttttgcactcacactgcccaga

SEQ ID NO: 6120 - RNA, 37 nt, synthetic construct
  source 1..37: mol_type = other RNA; note = RTT*3 (GGG-to-GGC PAM silencing edit)
gtcctttggcttcttttttgcactcacactggccaga

SEQ ID NO: 6121 - RNA, 37 nt, synthetic construct
  source 1..37: mol_type = other RNA; note = RTT*4 (GGG-to-GGA PAM silencing edit)
gtcctttggcttcttttttgcactcacactgtccaga

SEQ ID NO: 6122 - RNA, 38 nt, synthetic construct
  source 1..38: mol_type = other RNA; note = RTT*1 (GGG-to-GGT PAM silencing edit)
agtcctttggcttcttttttgcactcacactgaccaga

SEQ ID NO: 6123 - RNA, 38 nt, synthetic construct
  source 1..38: mol_type = other RNA; note = RTT*2,5,6,7,8
agtcctttggcttcttttttgcactcacactgcccaga

SEQ ID NO: 6124 - RNA, 38 nt, synthetic construct
  source 1..38: mol_type = other RNA; note = RTT*3 (GGG-to-GGC PAM silencing edit)
agtcctttggcttcttttttgcactcacactggccaga

SEQ ID NO: 6125 - RNA, 38 nt, synthetic construct
  source 1..38: mol_type = other RNA; note = RTT*4 (GGG-to-GGA PAM silencing edit)
agtcctttggcttcttttttgcactcacactgtccaga

SEQ ID NO: 6126 - RNA, 39 nt, synthetic construct
  source 1..39: mol_type = other RNA; note = RTT*1 (GGG-to-GGT PAM silencing edit)
aagtcctttggcttcttttttgcactcacactgaccaga

SEQ ID NO: 6127 - RNA, 39 nt, synthetic construct
  source 1..39: mol_type = other RNA; note = RTT*2,5,6,7,8
aagtcctttggcttcttttttgcactcacactgcccaga

SEQ ID NO: 6128 - RNA, 39 nt, synthetic construct
  source 1..39: mol_type = other RNA; note = RTT*3 (GGG-to-GGC PAM silencing edit)
aagtcctttggcttcttttttgcactcacactggccaga

SEQ ID NO: 6129 - RNA, 39 nt, synthetic construct
  source 1..39: mol_type = other RNA; note = RTT*4 (GGG-to-GGA PAM silencing edit)
aagtcctttggcttcttttttgcactcacactgtccaga

SEQ ID NO: 6130 - RNA, 40 nt, synthetic construct
  source 1..40: mol_type = other RNA; note = RTT*1 (GGG-to-GGT PAM silencing edit)
gaagtcctttggcttcttttttgcactcacactgaccaga

SEQ ID NO: 6131 - RNA, 40 nt, synthetic construct
  source 1..40: mol_type = other RNA; note = RTT*2,5,6,7,8
gaagtcctttggcttcttttttgcactcacactgcccaga

SEQ ID NO: 6132 - RNA, 40 nt, synthetic construct
  source 1..40: mol_type = other RNA; note = RTT*3 (GGG-to-GGC PAM silencing edit)
gaagtcctttggcttcttttttgcactcacactggccaga

SEQ ID NO: 6133 - RNA, 40 nt, synthetic construct
  source 1..40: mol_type = other RNA; note = RTT*4 (GGG-to-GGA PAM silencing edit)
gaagtcctttggcttcttttttgcactcacactgtccaga

SEQ ID NO: 6134 - RNA, 96 nt, synthetic construct
  source 1..96: mol_type = other RNA; note = ngRNA
cactcacactggccagagtggttttagagctagaaatagcaagttaaaataaggctagtccgttatcaacttgaaaaagtggcaccgagtcggtgc

SEQ ID NO: 6135 - RNA, 100 nt, synthetic construct
  source 1..100: mol_type = other RNA; note = ngRNA
cactcacactggccagagtggttttagagctagaaatagcaagttaaaataaggctagtccgttatcaacttgaaaaagtggcaccgagtcggtgctttt

SEQ ID NO: 6136 - RNA, 20 nt, synthetic construct
  source 1..20: mol_type = other RNA; note = PE3b*1 ngRNA spacer (AGG PAM)
cactcacactgaccagagtg

SEQ ID NO: 6137 - RNA, 20 nt, synthetic construct
  source 1..20: mol_type = other RNA; note = PE3b*3 ngRNA spacer (AGG PAM)
cactcacactggccagagtg

SEQ ID NO: 6138 - RNA, 20 nt, synthetic construct
  source 1..20: mol_type = other RNA; note = PE3b*4 ngRNA spacer (AGG PAM)
cactcacactgtccagagtg

SEQ ID NO: 6139 - RNA, 121 nt, synthetic construct
  source 1..121: mol_type = other RNA; note = pegRNA
aattctgcaatcctcactctgttttagagctagaaatagcaagttaaaataaggctagtccgttatcaacttgaaaaagtggcaccgagtcggtgccactcacactgaccagagtgaggat

SEQ ID NO: 6140 - RNA, 121 nt, synthetic construct
  source 1..121: mol_type = other RNA; note = pegRNA
aattctgcaatcctcactctgttttagagctagaaatagcaagttaaaataaggctagtccgttatcaacttgaaaaagtggcaccgagtcggtgccactcacactggccagagtgaggat

SEQ ID NO: 6141 - RNA, 122 nt, synthetic construct
  source 1..122: mol_type = other RNA; note = pegRNA
aattctgcaatcctcactctgttttagagctagaaatagcaagttaaaataaggctagtccgttatcaacttgaaaaagtggcaccgagtcggtgccactcacactgaccagagtgaggatt

SEQ ID NO: 6142 - RNA, 122 nt, synthetic construct
  source 1..122: mol_type = other RNA; note = pegRNA
aattctgcaatcctcactctgttttagagctagaaatagcaagttaaaataaggctagtccgttatcaacttgaaaaagtggcaccgagtcggtgccactcacactggccagagtgaggatt

SEQ ID NO: 6143 - RNA, 122 nt, synthetic construct
  source 1..122: mol_type = other RNA; note = pegRNA
aattctgcaatcctcactctgttttagagctagaaatagcaagttaaaataaggctagtccgttatcaacttgaaaaagtggcaccgagtcggtgcgcactcacactgaccagagtgaggat

SEQ ID NO: 6144 - RNA, 122 nt, synthetic construct
  source 1..122: mol_type = other RNA; note = pegRNA
aattctgcaatcctcactctgttttagagctagaaatagcaagttaaaataaggctagtccgttatcaacttgaaaaagtggcaccgagtcggtgcgcactcacactgcccagagtgaggat

SEQ ID NO: 6145 - RNA, 122 nt, synthetic construct
  source 1..122: mol_type = other RNA; note = pegRNA
aattctgcaatcctcactctgttttagagctagaaatagcaagttaaaataaggctagtccgttatcaacttgaaaaagtggcaccgagtcggtgcgcactcacactggccagagtgaggat

SEQ ID NO: 6146 - RNA, 123 nt, synthetic construct
  source 1..123: mol_type = other RNA; note = pegRNA
aattctgcaatcctcactctgttttagagctagaaatagcaagttaaaataaggctagtccgttatcaacttgaaaaagtggcaccgagtcggtgccactcacactgaccagagtgaggattg

SEQ ID NO: 6147 - RNA, 123 nt, synthetic construct
  source 1..123: mol_type = other RNA; note = pegRNA
aattctgcaatcctcactctgttttagagctagaaatagcaagttaaaataaggctagtccgttatcaacttgaaaaagtggcaccgagtcggtgccactcacactggccagagtgaggattg

SEQ ID NO: 6148 - RNA, 123 nt, synthetic construct
  source 1..123: mol_type = other RNA; note = pegRNA
aattctgcaatcctcactctgttttagagctagaaatagcaagttaaaataaggctagtccgttatcaacttgaaaaagtggcaccgagtcggtgcgcactcacactgaccagagtgaggatt

SEQ ID NO: 6149 - RNA, 123 nt, synthetic construct
  source 1..123: mol_type = other RNA; note = pegRNA
aattctgcaatcctcactctgttttagagctagaaatagcaagttaaaataaggctagtccgttatcaacttgaaaaagtggcaccgagtcggtgcgcactcacactggccagagtgaggatt

SEQ ID NO: 6150 - RNA, 123 nt, synthetic construct
  source 1..123: mol_type = other RNA; note = pegRNA
aattctgcaatcctcactctgttttagagctagaaatagcaagttaaaataaggctagtccgttatcaacttgaaaaagtggcaccgagtcggtgctgcactcacactgaccagagtgaggat

SEQ ID NO: 6151 - RNA, 123 nt, synthetic construct
  source 1..123: mol_type = other RNA; note = pegRNA
aattctgcaatcctcactctgttttagagctagaaatagcaagttaaaataaggctagtccgttatcaacttgaaaaagtggcaccgagtcggtgctgcactcacactgcccagagtgaggat

SEQ ID NO: 6152 - RNA, 123 nt, synthetic construct
  source 1..123: mol_type = other RNA; note = pegRNA
aattctgcaatcctcactctgttttagagctagaaatagcaagttaaaataaggctagtccgttatcaacttgaaaaagtggcaccgagtcggtgctgcactcacactggccagagtgaggat

SEQ ID NO: 6153 - RNA, 123 nt, synthetic construct
  source 1..123: mol_type = other RNA; note = pegRNA
aattctgcaatcctcactctgttttagagctagaaatagcaagttaaaataaggctagtccgttatcaacttgaaaaagtggcaccgagtcggtgcgcactcacactgcccagagtgaggatt

SEQ ID NO: 6154 - RNA, 124 nt, synthetic construct
  source 1..124: mol_type = other RNA; note = pegRNA
aattctgcaatcctcactctgttttagagctagaaatagcaagttaaaataaggctagtccgttatcaacttgaaaaagtggcaccgagtcggtgccactcacactgaccagagtgaggattgc

SEQ ID NO: 6155 - RNA, 124 nt, synthetic construct
  source 1..124: mol_type = other RNA; note = pegRNA
aattctgcaatcctcactctgttttagagctagaaatagcaagttaaaataaggctagtccgttatcaacttgaaaaagtggcaccgagtcggtgccactcacactggccagagtgaggattgc

SEQ ID NO: 6156 - RNA, 124 nt, synthetic construct
  source 1..124: mol_type = other RNA; note = pegRNA
aattctgcaatcctcactctgttttagagctagaaatagcaagttaaaataaggctagtccgttatcaacttgaaaaagtggcaccgagtcggtgcgcactcacactgaccagagtgaggattg

SEQ ID NO: 6157 - RNA, 124 nt, synthetic construct
  source 1..124: mol_type = other RNA; note = pegRNA
aattctgcaatcctcactctgttttagagctagaaatagcaagttaaaataaggctagtccgttatcaacttgaaaaagtggcaccgagtcggtgcgcactcacactgcccagagtgaggattg

SEQ ID NO: 6158 - RNA, 124 nt, synthetic construct
  source 1..124: mol_type = other RNA; note = pegRNA
aattctgcaatcctcactctgttttagagctagaaatagcaagttaaaataaggctagtccgttatcaacttgaaaaagtggcaccgagtcggtgcgcactcacactggccagagtgaggattg

SEQ ID NO: 6159 - RNA, 124 nt, synthetic construct
  source 1..124: mol_type = other RNA; note = pegRNA
aattctgcaatcctcactctgttttagagctagaaatagcaagttaaaataaggctagtccgttatcaacttgaaaaagtggcaccgagtcggtgctgcactcacactgaccagagtgaggatt

SEQ ID NO: 6160 - RNA, 124 nt, synthetic construct
  source 1..124: mol_type = other RNA; note = pegRNA
aattctgcaatcctcactctgttttagagctagaaatagcaagttaaaataaggctagtccgttatcaacttgaaaaagtggcaccgagtcggtgctgcactcacactggccagagtgaggatt

SEQ ID NO: 6161 - RNA, 124 nt, synthetic construct
  source 1..124: mol_type = other RNA; note = pegRNA
aattctgcaatcctcactctgttttagagctagaaatagcaagttaaaataaggctagtccgttatcaacttgaaaaagtggcaccgagtcggtgcttgcactcacactgaccagagtgaggat

SEQ ID NO: 6162 - RNA, 124 nt, synthetic construct
  source 1..124: mol_type = other RNA; note = pegRNA
aattctgcaatcctcactctgttttagagctagaaatagcaagttaaaataaggctagtccgttatcaacttgaaaaagtggcaccgagtcggtgcttgcactcacactggccagagtgaggat

SEQ ID NO: 6163 - RNA, 124 nt, synthetic construct
  source 1..124: mol_type = other RNA; note = pegRNA
aattctgcaatcctcactctgttttagagctagaaatagcaagttaaaataaggctagtccgttatcaacttgaaaaagtggcaccgagtcggtgctgcactcacactgcccagagtgaggatt

SEQ ID NO: 6164 - RNA, 124 nt, synthetic construct
  source 1..124: mol_type = other RNA; note = pegRNA
aattctgcaatcctcactctgttttagagctagaaatagcaagttaaaataaggctagtccgttatcaacttgaaaaagtggcaccgagtcggtgcttgcactcacactgcccagagtgaggat

SEQ ID NO: 6165 - RNA, 125 nt, synthetic construct
  source 1..125: mol_type = other RNA; note = pegRNA
aattctgcaatcctcactctgttttagagctagaaatagcaagttaaaataaggctagtccgttatcaacttgaaaaagtggcaccgagtcggtgccactcacactgaccagagtgaggattgca

SEQ ID NO: 6166 - RNA, 125 nt, synthetic construct
  source 1..125: mol_type = other RNA; note = pegRNA
aattctgcaatcctcactctgttttagagctagaaatagcaagttaaaataaggctagtccgttatcaacttgaaaaagtggcaccgagtcggtgccactcacactgaccagagtgaggattttt

SEQ ID NO: 6167 - RNA, 125 nt, synthetic construct
  source 1..125: mol_type = other RNA; note = pegRNA
aattctgcaatcctcactctgttttagagctagaaatagcaagttaaaataaggctagtccgttatcaacttgaaaaagtggcaccgagtcggtgccactcacactggccagagtgaggattgca

SEQ ID NO: 6168 - RNA, 125 nt, synthetic construct
  source 1..125: mol_type = other RNA; note = pegRNA
aattctgcaatcctcactctgttttagagctagaaatagcaagttaaaataaggctagtccgttatcaacttgaaaaagtggcaccgagtcggtgccactcacactggccagagtgaggattttt

SEQ ID NO: 6169 - RNA, 125 nt, synthetic construct
  source 1..125: mol_type = other RNA; note = pegRNA
aattctgcaatcctcactctgttttagagctagaaatagcaagttaaaataaggctagtccgttatcaacttgaaaaagtggcaccgagtcggtgcgcactcacactgaccagagtgaggattgc

SEQ ID NO: 6170 - RNA, 125 nt, synthetic construct
  source 1..125: mol_type = other RNA; note = pegRNA
aattctgcaatcctcactctgttttagagctagaaatagcaagttaaaataaggctagtccgttatcaacttgaaaaagtggcaccgagtcggtgcgcactcacactggccagagtgaggattgc

SEQ ID NO: 6171 - RNA, 125 nt, synthetic construct
  source 1..125: mol_type = other RNA; note = pegRNA
aattctgcaatcctcactctgttttagagctagaaatagcaagttaaaataaggctagtccgttatcaacttgaaaaagtggcaccgagtcggtgctgcactcacactgaccagagtgaggattg

SEQ ID NO: 6172 - RNA, 125 nt, synthetic construct
  source 1..125: mol_type = other RNA; note = pegRNA
aattctgcaatcctcactctgttttagagctagaaatagcaagttaaaataaggctagtccgttatcaacttgaaaaagtggcaccgagtcggtgctgcactcacactgcccagagtgaggattg

SEQ ID NO: 6173 - RNA, 125 nt, synthetic construct
  source 1..125: mol_type = other RNA; note = pegRNA
aattctgcaatcctcactctgttttagagctagaaatagcaagttaaaataaggctagtccgttatcaacttgaaaaagtggcaccgagtcggtgctgcactcacactggccagagtgaggattg

SEQ ID NO: 6174 - RNA, 125 nt, synthetic construct
  source 1..125: mol_type = other RNA; note = pegRNA
aattctgcaatcctcactctgttttagagctagaaatagcaagttaaaataaggctagtccgttatcaacttgaaaaagtggcaccgagtcggtgcttgcactcacactgaccagagtgaggatt

SEQ ID NO: 6175 - RNA, 125 nt, synthetic construct
  source 1..125: mol_type = other RNA; note = pegRNA
aattctgcaatcctcactctgttttagagctagaaatagcaagttaaaataaggctagtccgttatcaacttgaaaaagtggcaccgagtcggtgcttgcactcacactggccagagtgaggatt

SEQ ID NO: 6176 - RNA, 125 nt, synthetic construct
  source 1..125: mol_type = other RNA; note = pegRNA
aattctgcaatcctcactctgttttagagctagaaatagcaagttaaaataaggctagtccgttatcaacttgaaaaagtggcaccgagtcggtgctttgcactcacactgaccagagtgaggat

SEQ ID NO: 6177 - RNA, 125 nt, synthetic construct
  source 1..125: mol_type = other RNA; note = pegRNA
aattctgcaatcctcactctgttttagagctagaaatagcaagttaaaataaggctagtccgttatcaacttgaaaaagtggcaccgagtcggtgctttgcactcacactgcccagagtgaggat

SEQ ID NO: 6178 - RNA, 125 nt, synthetic construct
  source 1..125: mol_type = other RNA; note = pegRNA
aattctgcaatcctcactctgttttagagctagaaatagcaagttaaaataaggctagtccgttatcaacttgaaaaagtggcaccgagtcggtgctttgcactcacactggccagagtgaggat

SEQ ID NO: 6179 - RNA, 125 nt, synthetic construct
  source 1..125: mol_type = other RNA; note = pegRNA
aattctgcaatcctcactctgttttagagctagaaatagcaagttaaaataaggctagtccgttatcaacttgaaaaagtggcaccgagtcggtgcgcactcacactgcccagagtgaggattgc

SEQ ID NO: 6180 - RNA, 125 nt, synthetic construct
  source 1..125: mol_type = other RNA; note = pegRNA
aattctgcaatcctcactctgttttagagctagaaatagcaagttaaaataaggctagtccgttatcaacttgaaaaagtggcaccgagtcggtgcttgcactcacactgcccagagtgaggatt

SEQ ID NO: 6181 - RNA, 126 nt, synthetic construct
  source 1..126: mol_type = other RNA; note = pegRNA
aattctgcaatcctcactctgttttagagctagaaatagcaagttaaaataaggctagtccgttatcaacttgaaaaagtggcaccgagtcggtgccactcacactgaccagagtgaggattgcag

SEQ ID NO: 6182 - RNA, 126 nt, synthetic construct
  source 1..126: mol_type = other RNA; note = pegRNA
aattctgcaatcctcactctgttttagagctagaaatagcaagttaaaataaggctagtccgttatcaacttgaaaaagtggcaccgagtcggtgccactcacactgaccagagtgaggatttttt

SEQ ID NO: 6183 - RNA, 126 nt, synthetic construct
  source 1..126: mol_type = other RNA; note = pegRNA
aattctgcaatcctcactctgttttagagctagaaatagcaagttaaaataaggctagtccgttatcaacttgaaaaagtggcaccgagtcggtgccactcacactggccagagtgaggattgcag

SEQ ID NO: 6184 - RNA, 126 nt, synthetic construct
  source 1..126: mol_type = other RNA; note = pegRNA
aattctgcaatcctcactctgttttagagctagaaatagcaagttaaaataaggctagtccgttatcaacttgaaaaagtggcaccgagtcggtgccactcacactggccagagtgaggatttttt

SEQ ID NO: 6185 - RNA, 126 nt, synthetic construct
  source 1..126: mol_type = other RNA; note = pegRNA
aattctgcaatcctcactctgttttagagctagaaatagcaagttaaaataaggctagtccgttatcaacttgaaaaagtggcaccgagtcggtgcgcactcacactgaccagagtgaggattgca

SEQ ID NO: 6186 - RNA, 126 nt, synthetic construct
  source 1..126: mol_type = other RNA; note = pegRNA
aattctgcaatcctcactctgttttagagctagaaatagcaagttaaaataaggctagtccgttatcaacttgaaaaagtggcaccgagtcggtgcgcactcacactgaccagagtgaggattttt

SEQ ID NO: 6187 - RNA, 126 nt, synthetic construct
  source 1..126: mol_type = other RNA; note = pegRNA
aattctgcaatcctcactctgttttagagctagaaatagcaagttaaaataaggctagtccgttatcaacttgaaaaagtggcaccgagtcggtgcgcactcacactgcccagagtgaggattgca

SEQ ID NO: 6188 - RNA, 126 nt, synthetic construct
  source 1..126: mol_type = other RNA; note = pegRNA
aattctgcaatcctcactctgttttagagctagaaatagcaagttaaaataaggctagtccgttatcaacttgaaaaagtggcaccgagtcggtgcgcactcacactgcccagagtgaggattttt

SEQ ID NO: 6189 - RNA, 126 nt, synthetic construct
  source 1..126: mol_type = other RNA; note = pegRNA
aattctgcaatcctcactctgttttagagctagaaatagcaagttaaaataaggctagtccgttatcaacttgaaaaagtggcaccgagtcggtgcgcactcacactggccagagtgaggattgca

SEQ ID NO: 6190 - RNA, 126 nt, synthetic construct
  source 1..126: mol_type = other RNA; note = pegRNA
aattctgcaatcctcactctgttttagagctagaaatagcaagttaaaataaggctagtccgttatcaacttgaaaaagtggcaccgagtcggtgcgcactcacactggccagagtgaggattttt

SEQ ID NO: 6191 - RNA, 126 nt, synthetic construct
  source 1..126: mol_type = other RNA; note = pegRNA
aattctgcaatcctcactctgttttagagctagaaatagcaagttaaaataaggctagtccgttatcaacttgaaaaagtggcaccgagtcggtgctgcactcacactgaccagagtgaggattgc

SEQ ID NO: 6192 - RNA, 126 nt, synthetic construct
  source 1..126: mol_type = other RNA; note = pegRNA
aattctgcaatcctcactctgttttagagctagaaatagcaagttaaaataaggctagtccgttatcaacttgaaaaagtggcaccgagtcggtgctgcactcacactggccagagtgaggattgc

SEQ ID NO: 6193 - RNA, 126 nt, synthetic construct
  source 1..126: mol_type = other RNA; note = pegRNA
aattctgcaatcctcactctgttttagagctagaaatagcaagttaaaataaggctagtccgttatcaacttgaaaaagtggcaccgagtcggtgcttgcactcacactgaccagagtgaggattg

SEQ ID NO: 6194 - RNA, 126 nt, synthetic construct
  source 1..126: mol_type = other RNA; note = pegRNA
aattctgcaatcctcactctgttttagagctagaaatagcaagttaaaataaggctagtccgttatcaacttgaaaaagtggcaccgagtcggtgcttgcactcacactggccagagtgaggattg

SEQ ID NO: 6195 - RNA, 126 nt, synthetic construct
  source 1..126: mol_type = other RNA; note = pegRNA
aattctgcaatcctcactctgttttagagctagaaatagcaagttaaaataaggctagtccgttatcaacttgaaaaagtggcaccgagtcggtgctttgcactcacactgaccagagtgaggatt

SEQ ID NO: 6196 - RNA, 126 nt, synthetic construct
  source 1..126: mol_type = other RNA; note = pegRNA
aattctgcaatcctcactctgttttagagctagaaatagcaagttaaaataaggctagtccgttatcaacttgaaaaagtggcaccgagtcggtgctttgcactcacactggccagagtgaggatt

SEQ ID NO: 6197 - RNA, 126 nt, synthetic construct
  source 1..126: mol_type = other RNA; note = pegRNA
aattctgcaatcctcactctgttttagagctagaaatagcaagttaaaataaggctagtccgttatcaacttgaaaaagtggcaccgagtcggtgcttttgcactcacactgaccagagtgaggat

SEQ ID NO: 6198 - RNA, 126 nt, synthetic construct
  source 1..126: mol_type = other RNA; note = pegRNA
aattctgcaatcctcactctgttttagagctagaaatagcaagttaaaataaggctagtccgttatcaacttgaaaaagtggcaccgagtcggtgcttttgcactcacactggccagagtgaggat

SEQ ID NO: 6199 - RNA, 126 nt, synthetic construct
  source 1..126: mol_type = other RNA; note = pegRNA
aattctgcaatcctcactctgttttagagctagaaatagcaagttaaaataaggctagtccgttatcaacttgaaaaagtggcaccgagtcggtgctgcactcacactgcccagagtgaggattgc

SEQ ID NO: 6200 - RNA, 126 nt, synthetic construct
  source 1..126: mol_type = other RNA; note = pegRNA
aattctgcaatcctcactctgttttagagctagaaatagcaagttaaaataaggctagtccgttatcaacttgaaaaagtggcaccgagtcggtgcttgcactcacactgcccagagtgaggattg

SEQ ID NO: 6201 - RNA, 126 nt, synthetic construct
  source 1..126: mol_type = other RNA; note = pegRNA
aattctgcaatcctcactctgttttagagctagaaatagcaagttaaaataaggctagtccgttatcaacttgaaaaagtggcaccgagtcggtgctttgcactcacactgcccagagtgaggatt

SEQ ID NO: 6202 - RNA, 126 nt, synthetic construct
  source 1..126: mol_type = other RNA; note = pegRNA
aattctgcaatcctcactctgttttagagctagaaatagcaagttaaaataaggctagtccgttatcaacttgaaaaagtggcaccgagtcggtgcttttgcactcacactgcccagagtgaggat

SEQ ID NO: 6203 - RNA, 127 nt, synthetic construct
  source 1..127: mol_type = other RNA; note = pegRNA
aattctgcaatcctcactctgttttagagctagaaatagcaagttaaaataaggctagtccgttatcaacttgaaaaagtggcaccgagtcggtgccactcacactgaccagagtgaggattgcaga

SEQ ID NO: 6204 - RNA, 127 nt, synthetic construct
  source 1..127: mol_type = other RNA; note = pegRNA
aattctgcaatcctcactctgttttagagctagaaatagcaagttaaaataaggctagtccgttatcaacttgaaaaagtggcaccgagtcggtgccactcacactgaccagagtgaggattgtttt

SEQ ID NO: 6205 - RNA, 127 nt, synthetic construct
  source 1..127: mol_type = other RNA; note = pegRNA
aattctgcaatcctcactctgttttagagctagaaatagcaagttaaaataaggctagtccgttatcaacttgaaaaagtggcaccgagtcggtgccactcacactggccagagtgaggattgcaga

SEQ ID NO: 6206 - RNA, 127 nt, synthetic construct
  source 1..127: mol_type = other RNA; note = pegRNA
aattctgcaatcctcactctgttttagagctagaaatagcaagttaaaataaggctagtccgttatcaacttgaaaaagtggcaccgagtcggtgccactcacactggccagagtgaggattgtttt

SEQ ID NO: 6207 - RNA, 127 nt, synthetic construct
  source 1..127: mol_type = other RNA; note = pegRNA
aattctgcaatcctcactctgttttagagctagaaatagcaagttaaaataaggctagtccgttatcaacttgaaaaagtggcaccgagtcggtgcgcactcacactgaccagagtgaggattgcag

SEQ ID NO: 6208 - RNA, 127 nt, synthetic construct
  source 1..127: mol_type = other RNA; note = pegRNA
aattctgcaatcctcactctgttttagagctagaaatagcaagttaaaataaggctagtccgttatcaacttgaaaaagtggcaccgagtcggtgcgcactcacactgaccagagtgaggatttttt

SEQ ID NO: 6209 - RNA, 127 nt, synthetic construct
  source 1..127: mol_type = other RNA; note = pegRNA
aattctgcaatcctcactctgttttagagctagaaatagcaagttaaaataaggctagtccgttatcaacttgaaaaagtggcaccgagtcggtgcgcactcacactggccagagtgaggattgcag

SEQ ID NO: 6210 - RNA, 127 nt, synthetic construct
  source 1..127: mol_type = other RNA; note = pegRNA
aattctgcaatcctcactctgttttagagctagaaatagcaagttaaaataaggctagtccgttatcaacttgaaaaagtggcaccgagtcggtgcgcactcacactggccagagtgaggatttttt

SEQ ID NO: 6211 - RNA, 127 nt, synthetic construct
  source 1..127: mol_type = other RNA; note = pegRNA
aattctgcaatcctcactctgttttagagctagaaatagcaagttaaaataaggctagtccgttatcaacttgaaaaagtggcaccgagtcggtgctgcactcacactgaccagagtgaggattgca

SEQ ID NO: 6212 - RNA, 127 nt, synthetic construct
  source 1..127: mol_type = other RNA; note = pegRNA
aattctgcaatcctcactctgttttagagctagaaatagcaagttaaaataaggctagtccgttatcaacttgaaaaagtggcaccgagtcggtgctgcactcacactgaccagagtgaggattttt

SEQ ID NO: 6213 - RNA, 127 nt, synthetic construct
  source 1..127: mol_type = other RNA; note = pegRNA
aattctgcaatcctcactctgttttagagctagaaatagcaagttaaaataaggctagtccgttatcaacttgaaaaagtggcaccgagtcggtgctgcactcacactgcccagagtgaggattgca

SEQ ID NO: 6214 - RNA, 127 nt, synthetic construct
  source 1..127: mol_type = other RNA; note = pegRNA
aattctgcaatcctcactctgttttagagctagaaatagcaagttaaaataaggctagtccgttatcaacttgaaaaagtggcaccgagtcggtgctgcactcacactgcccagagtgaggattttt

SEQ ID NO: 6215 - RNA, 127 nt, synthetic construct
  source 1..127: mol_type = other RNA; note = pegRNA
aattctgcaatcctcactctgttttagagctagaaatagcaagttaaaataaggctagtccgttatcaacttgaaaaagtggcaccgagtcggtgctgcactcacactggccagagtgaggattgca

SEQ ID NO: 6216 - RNA, 127 nt, synthetic construct
  source 1..127: mol_type = other RNA; note = pegRNA
aattctgcaatcctcactctgttttagagctagaaatagcaagttaaaataaggctagtccgttatcaacttgaaaaagtggcaccgagtcggtgctgcactcacactggccagagtgaggattttt

SEQ ID NO: 6217 - RNA, 127 nt, synthetic construct
  source 1..127: mol_type = other RNA; note = pegRNA
aattctgcaatcctcactctgttttagagctagaaatagcaagttaaaataaggctagtccgttatcaacttgaaaaagtggcaccgagtcggtgcttgcactcacactgaccagagtgaggattgc

SEQ ID NO: 6218 - RNA, 127 nt, synthetic construct
  source 1..127: mol_type = other RNA; note = pegRNA
aattctgcaatcctcactctgttttagagctagaaatagcaagttaaaataaggctagtccgttatcaacttgaaaaagtggcaccgagtcggtgcttgcactcacactggccagagtgaggattgc

SEQ ID NO: 6219 - RNA, 127 nt, synthetic construct
  source 1..127: mol_type = other RNA; note = pegRNA
aattctgcaatcctcactctgttttagagctagaaatagcaagttaaaataaggctagtccgttatcaacttgaaaaagtggcaccgagtcggtgctttgcactcacactgaccagagtgaggattg

SEQ ID NO: 6220 - RNA, 127 nt, synthetic construct
  source 1..127: mol_type = other RNA; note = pegRNA
aattctgcaatcctcactctgttttagagctagaaatagcaagttaaaataaggctagtccgttatcaacttgaaaaagtggcaccgagtcggtgctttgcactcacactgcccagagtgaggattg

SEQ ID NO: 6221 - RNA, 127 nt, synthetic construct
  source 1..127: mol_type = other RNA; note = pegRNA
aattctgcaatcctcactctgttttagagctagaaatagcaagttaaaataaggctagtccgttatcaacttgaaaaagtggcaccgagtcggtgctttgcactcacactggccagagtgaggattg

SEQ ID NO: 6222 - RNA, 127 nt, synthetic construct
  source 1..127: mol_type = other RNA; note = pegRNA
aattctgcaatcctcactctgttttagagctagaaatagcaagttaaaataaggctagtccgttatcaacttgaaaaagtggcaccgagtcggtgcttttgcactcacactgaccagagtgaggatt

SEQ ID NO: 6223 - RNA, 127 nt, synthetic construct
  source 1..127: mol_type = other RNA; note = pegRNA
aattctgcaatcctcactctgttttagagctagaaatagcaagttaaaataaggctagtccgttatcaacttgaaaaagtggcaccgagtcggtgcttttgcactcacactggccagagtgaggatt

SEQ ID NO: 6224 - RNA, 127 nt, synthetic construct
  source 1..127: mol_type = other RNA; note = pegRNA
aattctgcaatcctcactctgttttagagctagaaatagcaagttaaaataaggctagtccgttatcaacttgaaaaagtggcaccgagtcggtgctttttgcactcacactgaccagagtgaggat

SEQ ID NO: 6225 - RNA, 127 nt, synthetic construct
  source 1..127: mol_type = other RNA; note = pegRNA
aattctgcaatcctcactctgttttagagctagaaatagcaagttaaaataaggctagtccgttatcaacttgaaaaagtggcaccgagtcggtgctttttgcactcacactggccagagtgaggat

SEQ ID NO: 6226 - RNA, 127 nt, synthetic construct
  source 1..127: mol_type = other RNA; note = pegRNA
aattctgcaatcctcactctgttttagagctagaaatagcaagttaaaataaggctagtccgttatcaacttgaaaaagtggcaccgagtcggtgcgcactcacactgcccagagtgaggattgcag

SEQ ID NO: 6227 - RNA, 127 nt, synthetic construct
  source 1..127: mol_type = other RNA; note = pegRNA
aattctgcaatcctcactctgttttagagctagaaatagcaagttaaaataaggctagtccgttatcaacttgaaaaagtggcaccgagtcggtgcgcactcacactgcccagagtgaggatttttt

SEQ ID NO: 6228 - RNA, 127 nt, synthetic construct
  source 1..127: mol_type = other RNA; note = pegRNA
aattctgcaatcctcactctgttttagagctagaaatagcaagttaaaataaggctagtccgttatcaacttgaaaaagtggcaccgagtcggtgcttgcactcacactgcccagagtgaggattgc

SEQ ID NO: 6229 - RNA, 127 nt, synthetic construct
  source 1..127: mol_type = other RNA; note = pegRNA
aattctgcaatcctcactctgttttagagctagaaatagcaagttaaaataaggctagtccgttatcaacttgaaaaagtggcaccgagtcggtgcttttgcactcacactgcccagagtgaggatt

SEQ ID NO: 6230 - RNA, 128 nt, synthetic construct
  source 1..128: mol_type = other RNA; note = pegRNA
aattctgcaatcctcactctgttttagagctagaaatagcaagttaaaataaggctagtccgttatcaacttgaaaaagtggcaccgagtcggtgccactcacactgaccagagtgaggattgcagaa

SEQ ID NO: 6231 - RNA, 128 nt, synthetic construct
  source 1..128: mol_type = other RNA; note = pegRNA
aattctgcaatcctcactctgttttagagctagaaatagcaagttaaaataaggctagtccgttatcaacttgaaaaagtggcaccgagtcggtgccactcacactgaccagagtgaggattgctttt

SEQ ID NO: 6232 - RNA, 128 nt, synthetic construct
  source 1..128: mol_type = other RNA; note = pegRNA
aattctgcaatcctcactctgttttagagctagaaatagcaagttaaaataaggctagtccgttatcaacttgaaaaagtggcaccgagtcggtgccactcacactggccagagtgaggattgcagaa

SEQ ID NO: 6233 - RNA, 128 nt, synthetic construct
  source 1..128: mol_type = other RNA; note = pegRNA
aattctgcaatcctcactctgttttagagctagaaatagcaagttaaaataaggctagtccgttatcaacttgaaaaagtggcaccgagtcggtgccactcacactggccagagtgaggattgctttt

SEQ ID NO: 6234 - RNA, 128 nt, synthetic construct
  source 1..128: mol_type = other RNA; note = pegRNA
aattctgcaatcctcactctgttttagagctagaaatagcaagttaaaataaggctagtccgttatcaacttgaaaaagtggcaccgagtcggtgcgcactcacactgaccagagtgaggattgcaga

SEQ ID NO: 6235 - RNA, 128 nt, synthetic construct
  source 1..128: mol_type = other RNA; note = pegRNA
aattctgcaatcctcactctgttttagagctagaaatagcaagttaaaataaggctagtccgttatcaacttgaaaaagtggcaccgagtcggtgcgcactcacactgaccagagtgaggattgtttt

SEQ ID NO: 6236 - RNA, 128 nt, synthetic construct
  source 1..128: mol_type = other RNA; note = pegRNA
aattctgcaatcctcactctgttttagagctagaaatagcaagttaaaataaggctagtccgttatcaacttgaaaaagtggcaccgagtcggtgcgcactcacactgcccagagtgaggattgcaga

SEQ ID NO: 6237 - RNA, 128 nt, synthetic construct
  source 1..128: mol_type = other RNA; note = pegRNA
aattctgcaatcctcactctgttttagagctagaaatagcaagttaaaataaggctagtccgttatcaacttgaaaaagtggcaccgagtcggtgcgcactcacactgcccagagtgaggattgtttt

SEQ ID NO: 6238 - RNA, 128 nt, synthetic construct
  source 1..128: mol_type = other RNA; note = pegRNA
aattctgcaatcctcactctgttttagagctagaaatagcaagttaaaataaggctagtccgttatcaacttgaaaaagtggcaccgagtcggtgcgcactcacactggccagagtgaggattgcaga

SEQ ID NO: 6239 - RNA, 128 nt, synthetic construct
  source 1..128: mol_type = other RNA; note = pegRNA
aattctgcaatcctcactctgttttagagctagaaatagcaagttaaaataaggctagtccgttatcaacttgaaaaagtggcaccgagtcggtgcgcactcacactggccagagtgaggattgtttt

SEQ ID NO: 6240 - RNA, 128 nt, synthetic construct
  source 1..128: mol_type = other RNA; note = pegRNA
aattctgcaatcctcactctgttttagagctagaaatagcaagttaaaataaggctagtccgttatcaacttgaaaaagtggcaccgagtcggtgctgcactcacactgaccagagtgaggattgcag

SEQ ID NO: 6241 - RNA, 128 nt, synthetic construct
  source 1..128: mol_type = other RNA; note = pegRNA
aattctgcaatcctcactctgttttagagctagaaatagcaagttaaaataaggctagtccgttatcaacttgaaaaagtggcaccgagtcggtgctgcactcacactgaccagagtgaggatttttt

SEQ ID NO: 6242 - RNA, 128 nt, synthetic construct
  source 1..128: mol_type = other RNA; note = pegRNA
aattctgcaatcctcactctgttttagagctagaaatagcaagttaaaataaggctagtccgttatcaacttgaaaaagtggcaccgagtcggtgctgcactcacactggccagagtgaggattgcag

SEQ ID NO: 6243 - RNA, 128 nt, synthetic construct
  source 1..128: mol_type = other RNA; note = pegRNA
aattctgcaatcctcactctgttttagagctagaaatagcaagttaaaataaggctagtccgttatcaacttgaaaaagtggcaccgagtcggtgctgcactcacactggccagagtgaggatttttt

SEQ ID NO: 6244 - RNA, 128 nt, synthetic construct
  source 1..128: mol_type = other RNA; note = pegRNA
aattctgcaatcctcactctgttttagagctagaaatagcaagttaaaataaggctagtccgttatcaacttgaaaaagtggcaccgagtcggtgcttgcactcacactgaccagagtgaggattgca

SEQ ID NO: 6245 - RNA, 128 nt, synthetic construct
  source 1..128: mol_type = other RNA; note = pegRNA
aattctgcaatcctcactctgttttagagctagaaatagcaagttaaaataaggctagtccgttatcaacttgaaaaagtggcaccgagtcggtgcttgcactcacactgaccagagtgaggattttt

SEQ ID NO: 6246 - RNA, 128 nt, synthetic construct
  source 1..128: mol_type = other RNA; note = pegRNA
aattctgcaatcctcactctgttttagagctagaaatagcaagttaaaataaggctagtccgttatcaacttgaaaaagtggcaccgagtcggtgcttgcactcacactggccagagtgaggattgca

SEQ ID NO: 6247 - RNA, 128 nt, synthetic construct
  source 1..128: mol_type = other RNA; note = pegRNA
aattctgcaatcctcactctgttttagagctagaaatagcaagttaaaataaggctagtccgttatcaacttgaaaaagtggcaccgagtcggtgcttgcactcacactggccagagtgaggattttt

SEQ ID NO: 6248 - RNA, 128 nt, synthetic construct
  source 1..128: mol_type = other RNA; note = pegRNA
aattctgcaatcctcactctgttttagagctagaaatagcaagttaaaataaggctagtccgttatcaacttgaaaaagtggcaccgagtcggtgctttgcactcacactgaccagagtgaggattgc

SEQ ID NO: 6249 - RNA, 128 nt, synthetic construct
  source 1..128: mol_type = other RNA; note = pegRNA
aattctgcaatcctcactctgttttagagctagaaatagcaagttaaaataaggctagtccgttatcaacttgaaaaagtggcaccgagtcggtgctttgcactcacactggccagagtgaggattgc

SEQ ID NO: 6250 - RNA, 128 nt, synthetic construct
  source 1..128: mol_type = other RNA; note = pegRNA
aattctgcaatcctcactctgttttagagctagaaatagcaagttaaaataaggctagtccgttatcaacttgaaaaagtggcaccgagtcggtgcttttgcactcacactgaccagagtgaggattg

SEQ ID NO: 6251 - RNA, 128 nt, synthetic construct
  source 1..128: mol_type = other RNA; note = pegRNA
aattctgcaatcctcactctgttttagagctagaaatagcaagttaaaataaggctagtccgttatcaacttgaaaaagtggcaccgagtcggtgcttttgcactcacactggccagagtgaggattg

SEQ ID NO: 6252 - RNA, 128 nt, synthetic construct
  source 1..128: mol_type = other RNA; note = pegRNA
aattctgcaatcctcactctgttttagagctagaaatagcaagttaaaataaggctagtccgttatcaacttgaaaaagtggcaccgagtcggtgctttttgcactcacactgaccagagtgaggatt

SEQ ID NO: 6253 - RNA, 128 nt, synthetic construct
  source 1..128: mol_type = other RNA; note = pegRNA
aattctgcaatcctcactctgttttagagctagaaatagcaagttaaaataaggctagtccgttatcaacttgaaaaagtggcaccgagtcggtgctttttgcactcacactggccagagtgaggatt

SEQ ID NO: 6254 - RNA, 128 nt, synthetic construct
  source 1..128: mol_type = other RNA; note = pegRNA
aattctgcaatcctcactctgttttagagctagaaatagcaagttaaaataaggctagtccgttatcaacttgaaaaagtggcaccgagtcggtgcttttttgcactcacactgaccagagtgaggat

SEQ ID NO: 6255 - RNA, 128 nt, synthetic construct
  source 1..128: mol_type = other RNA; note = pegRNA
aattctgcaatcctcactctgttttagagctagaaatagcaagttaaaataaggctagtccgttatcaacttgaaaaagtggcaccgagtcggtgcttttttgcactcacactggccagagtgaggat

SEQ ID NO: 6256 - RNA, 128 nt, synthetic construct
  source 1..128: mol_type = other RNA; note = pegRNA
aattctgcaatcctcactctgttttagagctagaaatagcaagttaaaataaggctagtccgttatcaacttgaaaaagtggcaccgagtcggtgctgcactcacactgcccagagtgaggattgcag

SEQ ID NO: 6257 - RNA, 128 nt, synthetic construct
  source 1..128: mol_type = other RNA; note = pegRNA
aattctgcaatcctcactctgttttagagctagaaatagcaagttaaaataaggctagtccgttatcaacttgaaaaagtggcaccgagtcggtgctgcactcacactgcccagagtgaggatttttt

SEQ ID NO: 6258 - RNA, 128 nt, synthetic construct
  source 1..128: mol_type = other RNA; note = pegRNA
aattctgcaatcctcactctgttttagagctagaaatagcaagttaaaataaggctagtccgttatcaacttgaaaaagtggcaccgagtcggtgcttgcactcacactgcccagagtgaggattgca

SEQ ID NO: 6259 - RNA, 128 nt, synthetic construct
  source 1..128: mol_type = other RNA; note = pegRNA
aattctgcaatcctcactctgttttagagctagaaatagcaagttaaaataaggctagtccgttatcaacttgaaaaagtggcaccgagtcggtgcttgcactcacactgcccagagtgaggattttt

SEQ ID NO: 6260 - RNA, 128 nt, synthetic construct
  source 1..128: mol_type = other RNA; note = pegRNA
aattctgcaatcctcactctgttttagagctagaaatagcaagttaaaataaggctagtccgttatcaacttgaaaaagtggcaccgagtcggtgctttgcactcacactgcccagagtgaggattgc

SEQ ID NO: 6261 - RNA, 128 nt, synthetic construct
  source 1..128: mol_type = other RNA; note = pegRNA
aattctgcaatcctcactctgttttagagctagaaatagcaagttaaaataaggctagtccgttatcaacttgaaaaagtggcaccgagtcggtgcttttgcactcacactgcccagagtgaggattg

SEQ ID NO: 6262 - RNA, 129 nt, synthetic construct
  source 1..129: mol_type = other RNA; note = pegRNA
aattctgcaatcctcactctgttttagagctagaaatagcaagttaaaataaggctagtccgttatcaacttgaaaaagtggcaccgagtcggtgccactcacactgaccagagtgaggattgcagaat

SEQ ID NO: 6263 - RNA, 129 nt, synthetic construct
  source 1..129: mol_type = other RNA; note = pegRNA
aattctgcaatcctcactctgttttagagctagaaatagcaagttaaaataaggctagtccgttatcaacttgaaaaagtggcaccgagtcggtgccactcacactgaccagagtgaggattgcatttt

SEQ ID NO: 6264 - RNA, 129 nt, synthetic construct
  source 1..129: mol_type = other RNA; note = pegRNA
aattctgcaatcctcactctgttttagagctagaaatagcaagttaaaataaggctagtccgttatcaacttgaaaaagtggcaccgagtcggtgccactcacactggccagagtgaggattgcagaat

SEQ ID NO: 6265 - RNA, 129 nt, synthetic construct
  source 1..129: mol_type = other RNA; note = pegRNA
aattctgcaatcctcactctgttttagagctagaaatagcaagttaaaataaggctagtccgttatcaacttgaaaaagtggcaccgagtcggtgccactcacactggccagagtgaggattgcatttt

SEQ ID NO: 6266 - RNA, 129 nt, synthetic construct
  source 1..129: mol_type = other RNA; note = pegRNA
aattctgcaatcctcactctgttttagagctagaaatagcaagttaaaataaggctagtccgttatcaacttgaaaaagtggcaccgagtcggtgccttttttgcactcacactgaccagagtgaggat

SEQ ID NO: 6267 - RNA, 129 nt, synthetic construct
  source 1..129: mol_type = other RNA; note = pegRNA
aattctgcaatcctcactctgttttagagctagaaatagcaagttaaaataaggctagtccgttatcaacttgaaaaagtggcaccgagtcggtgccttttttgcactcacactggccagagtgaggat

SEQ ID NO: 6268 - RNA, 129 nt, synthetic construct
  source 1..129: mol_type = other RNA; note = pegRNA
aattctgcaatcctcactctgttttagagctagaaatagcaagttaaaataaggctagtccgttatcaacttgaaaaagtggcaccgagtcggtgcgcactcacactgaccagagtgaggattgcagaa

SEQ ID NO: 6269 - RNA, 129 nt, synthetic construct
  source 1..129: mol_type = other RNA; note = pegRNA
aattctgcaatcctcactctgttttagagctagaaatagcaagttaaaataaggctagtccgttatcaacttgaaaaagtggcaccgagtcggtgcgcactcacactgaccagagtgaggattgctttt

SEQ ID NO: 6270 - RNA, 129 nt, synthetic construct
  source 1..129: mol_type = other RNA; note = pegRNA
aattctgcaatcctcactctgttttagagctagaaatagcaagttaaaataaggctagtccgttatcaacttgaaaaagtggcaccgagtcggtgcgcactcacactggccagagtgaggattgcagaa

SEQ ID NO: 6271 - RNA, 129 nt, synthetic construct
  source 1..129: mol_type = other RNA; note = pegRNA
aattctgcaatcctcactctgttttagagctagaaatagcaagttaaaataaggctagtccgttatcaacttgaaaaagtggcaccgagtcggtgcgcactcacactggccagagtgaggattgctttt

SEQ ID NO: 6272 - RNA, 129 nt, synthetic construct
  source 1..129: mol_type = other RNA; note = pegRNA
aattctgcaatcctcactctgttttagagctagaaatagcaagttaaaataaggctagtccgttatcaacttgaaaaagtggcaccgagtcggtgctgcactcacactgaccagagtgaggattgcaga

SEQ ID NO: 6273 - RNA, 129 nt, synthetic construct
  source 1..129: mol_type = other RNA; note = pegRNA
aattctgcaatcctcactctgttttagagctagaaatagcaagttaaaataaggctagtccgttatcaacttgaaaaagtggcaccgagtcggtgctgcactcacactgaccagagtgaggattgtttt

SEQ ID NO: 6274 - RNA, 129 nt, synthetic construct
  source 1..129: mol_type = other RNA; note = pegRNA
aattctgcaatcctcactctgttttagagctagaaatagcaagttaaaataaggctagtccgttatcaacttgaaaaagtggcaccgagtcggtgctgcactcacactgcccagagtgaggattgcaga

SEQ ID NO: 6275 - RNA, 129 nt, synthetic construct
  source 1..129: mol_type = other RNA; note = pegRNA
aattctgcaatcctcactctgttttagagctagaaatagcaagttaaaataaggctagtccgttatcaacttgaaaaagtggcaccgagtcggtgctgcactcacactgcccagagtgaggattgtttt

SEQ ID NO: 6276 - RNA, 129 nt, synthetic construct
  source 1..129: mol_type = other RNA; note = pegRNA
aattctgcaatcctcactctgttttagagctagaaatagcaagttaaaataaggctagtccgttatcaacttgaaaaagtggcaccgagtcggtgctgcactcacactggccagagtgaggattgcaga

SEQ ID NO: 6277 - RNA, 129 nt, synthetic construct
  source 1..129: mol_type = other RNA; note = pegRNA
aattctgcaatcctcactctgttttagagctagaaatagcaagttaaaataaggctagtccgttatcaacttgaaaaagtggcaccgagtcggtgctgcactcacactggccagagtgaggattgtttt

SEQ ID NO: 6278 - RNA, 129 nt, synthetic construct
  source 1..129: mol_type = other RNA; note = pegRNA
aattctgcaatcctcactctgttttagagctagaaatagcaagttaaaataaggctagtccgttatcaacttgaaaaagtggcaccgagtcggtgcttgcactcacactgaccagagtgaggattgcag

SEQ ID NO: 6279 - RNA, 129 nt, synthetic construct
  source 1..129: mol_type = other RNA; note = pegRNA
aattctgcaatcctcactctgttttagagctagaaatagcaagttaaaataaggctagtccgttatcaacttgaaaaagtggcaccgagtcggtgcttgcactcacactgaccagagtgaggatttttt

SEQ ID NO: 6280 - RNA, 129 nt, synthetic construct
  source 1..129: mol_type = other RNA; note = pegRNA
aattctgcaatcctcactctgttttagagctagaaatagcaagttaaaataaggctagtccgttatcaacttgaaaaagtggcaccgagtcggtgcttgcactcacactggccagagtgaggattgcag

SEQ ID NO: 6281 - RNA, 129 nt, synthetic construct
  source 1..129: mol_type = other RNA; note = pegRNA
aattctgcaatcctcactctgttttagagctagaaatagcaagttaaaataaggctagtccgttatcaacttgaaaaagtggcaccgagtcggtgcttgcactcacactggccagagtgaggatttttt

SEQ ID NO: 6282 - RNA, 129 nt, synthetic construct
  source 1..129: mol_type = other RNA; note = pegRNA
aattctgcaatcctcactctgttttagagctagaaatagcaagttaaaataaggctagtccgttatcaacttgaaaaagtggcaccgagtcggtgctttgcactcacactgaccagagtgaggattgca

SEQ ID NO: 6283 - RNA, 129 nt, synthetic construct
  source 1..129: mol_type = other RNA; note = pegRNA
aattctgcaatcctcactctgttttagagctagaaatagcaagttaaaataaggctagtccgttatcaacttgaaaaagtggcaccgagtcggtgctttgcactcacactgaccagagtgaggattttt

SEQ ID NO: 6284 - RNA, 129 nt, synthetic construct
  source 1..129: mol_type = other RNA; note = pegRNA
aattctgcaatcctcactctgttttagagctagaaatagcaagttaaaataaggctagtccgttatcaacttgaaaaagtggcaccgagtcggtgctttgcactcacactgcccagagtgaggattgca

SEQ ID NO: 6285 - RNA, 129 nt, synthetic construct
  source 1..129: mol_type = other RNA; note = pegRNA
aattctgcaatcctcactctgttttagagctagaaatagcaagttaaaataaggctagtccgttatcaacttgaaaaagtggcaccgagtcggtgctttgcactcacactgcccagagtgaggattttt

SEQ ID NO: 6286 - RNA, 129 nt, synthetic construct
  source 1..129: mol_type = other RNA; note = pegRNA
aattctgcaatcctcactctgttttagagctagaaatagcaagttaaaataaggctagtccgttatcaacttgaaaaagtggcaccgagtcggtgctttgcactcacactggccagagtgaggattgca

SEQ ID NO: 6287 - RNA, 129 nt, synthetic construct
  source 1..129: mol_type = other RNA; note = pegRNA
aattctgcaatcctcactctgttttagagctagaaatagcaagttaaaataaggctagtccgttatcaacttgaaaaagtggcaccgagtcggtgctttgcactcacactggccagagtgaggattttt

SEQ ID NO: 6288 - RNA, 129 nt, synthetic construct
  source 1..129: mol_type = other RNA; note = pegRNA
aattctgcaatcctcactctgttttagagctagaaatagcaagttaaaataaggctagtccgttatcaacttgaaaaagtggcaccgagtcggtgcttttgcactcacactgaccagagtgaggattgc

SEQ ID NO: 6289 - RNA, 129 nt, synthetic construct
  source 1..129: mol_type = other RNA; note = pegRNA
aattctgcaatcctcactctgttttagagctagaaatagcaagttaaaataaggctagtccgttatcaacttgaaaaagtggcaccgagtcggtgcttttgcactcacactggccagagtgaggattgc

SEQ ID NO: 6290 - RNA, 129 nt, synthetic construct
  source 1..129: mol_type = other RNA; note = pegRNA
aattctgcaatcctcactctgttttagagctagaaatagcaagttaaaataaggctagtccgttatcaacttgaaaaagtggcaccgagtcggtgctttttgcactcacactgaccagagtgaggattg

SEQ ID NO: 6291 - RNA, 129 nt, synthetic construct
  source 1..129: mol_type = other RNA; note = pegRNA
aattctgcaatcctcactctgttttagagctagaaatagcaagttaaaataaggctagtccgttatcaacttgaaaaagtggcaccgagtcggtgctttttgcactcacactggccagagtgaggattg

SEQ ID NO: 6292 - RNA, 129 nt, synthetic construct
  source 1..129: mol_type = other RNA; note = pegRNA
aattctgcaatcctcactctgttttagagctagaaatagcaagttaaaataaggctagtccgttatcaacttgaaaaagtggcaccgagtcggtgcttttttgcactcacactgaccagagtgaggatt

SEQ ID NO: 6293 - RNA, 129 nt, synthetic construct
  source 1..129: mol_type = other RNA; note = pegRNA
aattctgcaatcctcactctgttttagagctagaaatagcaagttaaaataaggctagtccgttatcaacttgaaaaagtggcaccgagtcggtgcttttttgcactcacactggccagagtgaggatt

SEQ ID NO: 6294 - RNA, 129 nt, synthetic construct
  source 1..129: mol_type = other RNA; note = pegRNA
aattctgcaatcctcactctgttttagagctagaaatagcaagttaaaataaggctagtccgttatcaacttgaaaaagtggcaccgagtcggtgcgcactcacactgcccagagtgaggattgctttt

SEQ ID NO: 6295 - RNA, 129 nt, synthetic construct
  source 1..129: mol_type = other RNA; note = pegRNA
aattctgcaatcctcactctgttttagagctagaaatagcaagttaaaataaggctagtccgttatcaacttgaaaaagtggcaccgagtcggtgcttgcactcacactgcccagagtgaggattgcag

SEQ ID NO: 6296 - RNA, 129 nt, synthetic construct
  source 1..129: mol_type = other RNA; note = pegRNA
aattctgcaatcctcactctgttttagagctagaaatagcaagttaaaataaggctagtccgttatcaacttgaaaaagtggcaccgagtcggtgcttgcactcacactgcccagagtgaggatttttt

SEQ ID NO: 6297 - RNA, 129 nt, synthetic construct
  source 1..129: mol_type = other RNA; note = pegRNA
aattctgcaatcctcactctgttttagagctagaaatagcaagttaaaataaggctagtccgttatcaacttgaaaaagtggcaccgagtcggtgcttttgcactcacactgcccagagtgaggattgc

SEQ ID NO: 6298 - RNA, 130 nt, synthetic construct
  source 1..130: mol_type = other RNA; note = pegRNA
aattctgcaatcctcactctgttttagagctagaaatagcaagttaaaataaggctagtccgttatcaacttgaaaaagtggcaccgagtcggtgccactcacactgaccagagtgaggattgcagtttt

SEQ ID NO: 6299 - RNA, 130 nt, synthetic construct
  source 1..130: mol_type = other RNA; note = pegRNA
aattctgcaatcctcactctgttttagagctagaaatagcaagttaaaataaggctagtccgttatcaacttgaaaaagtggcaccgagtcggtgccactcacactggccagagtgaggattgcagtttt

SEQ ID NO: 6300 - RNA, 130 nt, synthetic construct
  source 1..130: mol_type = other RNA; note = pegRNA
aattctgcaatcctcactctgttttagagctagaaatagcaagttaaaataaggctagtccgttatcaacttgaaaaagtggcaccgagtcggtgccttttttgcactcacactgaccagagtgaggatt

SEQ ID NO: 6301 - RNA, 130 nt, synthetic construct
  source 1..130: mol_type = other RNA; note = pegRNA
aattctgcaatcctcactctgttttagagctagaaatagcaagttaaaataaggctagtccgttatcaacttgaaaaagtggcaccgagtcggtgccttttttgcactcacactggccagagtgaggatt

SEQ ID NO: 6302 - RNA, 130 nt, synthetic construct
  source 1..130: mol_type = other RNA; note = pegRNA
aattctgcaatcctcactctgttttagagctagaaatagcaagttaaaataaggctagtccgttatcaacttgaaaaagtggcaccgagtcggtgcgcactcacactgaccagagtgaggattgcagaat

SEQ ID NO: 6303 - RNA, 130 nt, synthetic construct
  source 1..130: mol_type = other RNA; note = pegRNA
aattctgcaatcctcactctgttttagagctagaaatagcaagttaaaataaggctagtccgttatcaacttgaaaaagtggcaccgagtcggtgcgcactcacactgaccagagtgaggattgcatttt

SEQ ID NO: 6304 - RNA, 130 nt, synthetic construct
  source 1..130: mol_type = other RNA; note = pegRNA
aattctgcaatcctcactctgttttagagctagaaatagcaagttaaaataaggctagtccgttatcaacttgaaaaagtggcaccgagtcggtgcgcactcacactgcccagagtgaggattgcatttt

SEQ ID NO: 6305 - RNA, 130 nt, synthetic construct
  source 1..130: mol_type = other RNA; note = pegRNA
aattctgcaatcctcactctgttttagagctagaaatagcaagttaaaataaggctagtccgttatcaacttgaaaaagtggcaccgagtcggtgcgcactcacactggccagagtgaggattgcagaat

SEQ ID NO: 6306 - RNA, 130 nt, synthetic construct
  source 1..130: mol_type = other RNA; note = pegRNA
aattctgcaatcctcactctgttttagagctagaaatagcaagttaaaataaggctagtccgttatcaacttgaaaaagtggcaccgagtcggtgcgcactcacactggccagagtgaggattgcatttt

SEQ ID NO: 6307 - RNA, 130 nt, synthetic construct
  source 1..130: mol_type = other RNA; note = pegRNA
aattctgcaatcctcactctgttttagagctagaaatagcaagttaaaataaggctagtccgttatcaacttgaaaaagtggcaccgagtcggtgctcttttttgcactcacactgaccagagtgaggat

SEQ ID NO: 6308 - RNA, 130 nt, synthetic construct
  source 1..130: mol_type = other RNA; note = pegRNA
aattctgcaatcctcactctgttttagagctagaaatagcaagttaaaataaggctagtccgttatcaacttgaaaaagtggcaccgagtcggtgctcttttttgcactcacactggccagagtgaggat

SEQ ID NO: 6309 - RNA, 130 nt, synthetic construct
  source 1..130: mol_type = other RNA; note = pegRNA
aattctgcaatcctcactctgttttagagctagaaatagcaagttaaaataaggctagtccgttatcaacttgaaaaagtggcaccgagtcggtgctgcactcacactgaccagagtgaggattgcagaa

SEQ ID NO: 6310 - RNA, 130 nt, synthetic construct
  source 1..130: mol_type = other RNA; note = pegRNA
aattctgcaatcctcactctgttttagagctagaaatagcaagttaaaataaggctagtccgttatcaacttgaaaaagtggcaccgagtcggtgctgcactcacactgaccagagtgaggattgctttt

SEQ ID NO: 6311 - RNA, 130 nt, synthetic construct
  source 1..130: mol_type = other RNA; note = pegRNA
aattctgcaatcctcactctgttttagagctagaaatagcaagttaaaataaggctagtccgttatcaacttgaaaaagtggcaccgagtcggtgctgcactcacactggccagagtgaggattgcagaa

SEQ ID NO: 6312 - RNA, 130 nt, synthetic construct
  source 1..130: mol_type = other RNA; note = pegRNA
aattctgcaatcctcactctgttttagagctagaaatagcaagttaaaataaggctagtccgttatcaacttgaaaaagtggcaccgagtcggtgctgcactcacactggccagagtgaggattgctttt

SEQ ID NO: 6313 - RNA, 130 nt, synthetic construct
  source 1..130: mol_type = other RNA; note = pegRNA
aattctgcaatcctcactctgttttagagctagaaatagcaagttaaaataaggctagtccgttatcaacttgaaaaagtggcaccgagtcggtgcttgcactcacactgaccagagtgaggattgcaga

SEQ ID NO: 6314 - RNA, 130 nt, synthetic construct
  source 1..130: mol_type = other RNA; note = pegRNA
aattctgcaatcctcactctgttttagagctagaaatagcaagttaaaataaggctagtccgttatcaacttgaaaaagtggcaccgagtcggtgcttgcactcacactgaccagagtgaggattgtttt

SEQ ID NO: 6315 - RNA, 130 nt, synthetic construct
  source 1..130: mol_type = other RNA; note = pegRNA
aattctgcaatcctcactctgttttagagctagaaatagcaagttaaaataaggctagtccgttatcaacttgaaaaagtggcaccgagtcggtgcttgcactcacactggccagagtgaggattgcaga

SEQ ID NO: 6316 - RNA, 130 nt, synthetic construct
  source 1..130: mol_type = other RNA; note = pegRNA
aattctgcaatcctcactctgttttagagctagaaatagcaagttaaaataaggctagtccgttatcaacttgaaaaagtggcaccgagtcggtgcttgcactcacactggccagagtgaggattgtttt

SEQ ID NO: 6317 - RNA, 130 nt, synthetic construct
  source 1..130: mol_type = other RNA; note = pegRNA
aattctgcaatcctcactctgttttagagctagaaatagcaagttaaaataaggctagtccgttatcaacttgaaaaagtggcaccgagtcggtgctttgcactcacactgaccagagtgaggattgcag

SEQ ID NO: 6318 - RNA, 130 nt, synthetic construct
  source 1..130: mol_type = other RNA; note = pegRNA
aattctgcaatcctcactctgttttagagctagaaatagcaagttaaaataaggctagtccgttatcaacttgaaaaagtggcaccgagtcggtgctttgcactcacactgaccagagtgaggatttttt

SEQ ID NO: 6319 - RNA, 130 nt, synthetic construct
  source 1..130: mol_type = other RNA; note = pegRNA
aattctgcaatcctcactctgttttagagctagaaatagcaagttaaaataaggctagtccgttatcaacttgaaaaagtggcaccgagtcggtgctttgcactcacactggccagagtgaggattgcag

SEQ ID NO: 6320 - RNA, 130 nt, synthetic construct
  source 1..130: mol_type = other RNA; note = pegRNA
aattctgcaatcctcactctgttttagagctagaaatagcaagttaaaataaggctagtccgttatcaacttgaaaaagtggcaccgagtcggtgctttgcactcacactggccagagtgaggatttttt

SEQ ID NO: 6321 - RNA, 130 nt, synthetic construct
  source 1..130: mol_type = other RNA; note = pegRNA
aattctgcaatcctcactctgttttagagctagaaatagcaagttaaaataaggctagtccgttatcaacttgaaaaagtggcaccgagtcggtgcttttgcactcacactgaccagagtgaggattgca

SEQ ID NO: 6322 - RNA, 130 nt, synthetic construct
  source 1..130: mol_type = other RNA; note = pegRNA
aattctgcaatcctcactctgttttagagctagaaatagcaagttaaaataaggctagtccgttatcaacttgaaaaagtggcaccgagtcggtgcttttgcactcacactgaccagagtgaggattttt

SEQ ID NO: 6323 - RNA, 130 nt, synthetic construct
  source 1..130: mol_type = other RNA; note = pegRNA
aattctgcaatcctcactctgttttagagctagaaatagcaagttaaaataaggctagtccgttatcaacttgaaaaagtggcaccgagtcggtgcttttgcactcacactggccagagtgaggattgca

SEQ ID NO: 6324 - RNA, 130 nt, synthetic construct
  source 1..130: mol_type = other RNA; note = pegRNA
aattctgcaatcctcactctgttttagagctagaaatagcaagttaaaataaggctagtccgttatcaacttgaaaaagtggcaccgagtcggtgcttttgcactcacactggccagagtgaggattttt

SEQ ID NO: 6325 - RNA, 130 nt, synthetic construct
  source 1..130: mol_type = other RNA; note = pegRNA
aattctgcaatcctcactctgttttagagctagaaatagcaagttaaaataaggctagtccgttatcaacttgaaaaagtggcaccgagtcggtgctttttgcactcacactgaccagagtgaggattgc

SEQ ID NO: 6326 - RNA, 130 nt, synthetic construct
  source 1..130: mol_type = other RNA; note = pegRNA
aattctgcaatcctcactctgttttagagctagaaatagcaagttaaaataaggctagtccgttatcaacttgaaaaagtggcaccgagtcggtgctttttgcactcacactggccagagtgaggattgc

SEQ ID NO: 6327 - RNA, 130 nt, synthetic construct
  source 1..130: mol_type = other RNA; note = pegRNA
aattctgcaatcctcactctgttttagagctagaaatagcaagttaaaataaggctagtccgttatcaacttgaaaaagtggcaccgagtcggtgcttttttgcactcacactgaccagagtgaggattg

SEQ ID NO: 6328 - RNA, 130 nt, synthetic construct
  source 1..130: mol_type = other RNA; note = pegRNA
aattctgcaatcctcactctgttttagagctagaaatagcaagttaaaataaggctagtccgttatcaacttgaaaaagtggcaccgagtcggtgcttttttgcactcacactggccagagtgaggattg

SEQ ID NO: 6329 - RNA, 130 nt, synthetic construct
  source 1..130: mol_type = other RNA; note = pegRNA
aattctgcaatcctcactctgttttagagctagaaatagcaagttaaaataaggctagtccgttatcaacttgaaaaagtggcaccgagtcggtgctgcactcacactgcccagagtgaggattgctttt

SEQ ID NO: 6330 - RNA, 130 nt, synthetic construct
  source 1..130: mol_type = other RNA; note = pegRNA
aattctgcaatcctcactctgttttagagctagaaatagcaagttaaaataaggctagtccgttatcaacttgaaaaagtggcaccgagtcggtgcttgcactcacactgcccagagtgaggattgtttt

SEQ ID NO: 6331 - RNA, 130 nt, synthetic construct
  source 1..130: mol_type = other RNA; note = pegRNA
aattctgcaatcctcactctgttttagagctagaaatagcaagttaaaataaggctagtccgttatcaacttgaaaaagtggcaccgagtcggtgctttgcactcacactgcccagagtgaggattgcag

SEQ ID NO: 6332 - RNA, 130 nt, synthetic construct
  source 1..130: mol_type = other RNA; note = pegRNA
aattctgcaatcctcactctgttttagagctagaaatagcaagttaaaataaggctagtccgttatcaacttgaaaaagtggcaccgagtcggtgctttgcactcacactgcccagagtgaggatttttt

SEQ ID NO: 6333 - RNA, 130 nt, synthetic construct
  source 1..130: mol_type = other RNA; note = pegRNA
aattctgcaatcctcactctgttttagagctagaaatagcaagttaaaataaggctagtccgttatcaacttgaaaaagtggcaccgagtcggtgcttttgcactcacactgcccagagtgaggattgca

SEQ ID NO: 6334 - RNA, 130 nt, synthetic construct
  source 1..130: mol_type = other RNA; note = pegRNA
aattctgcaatcctcactctgttttagagctagaaatagcaagttaaaataaggctagtccgttatcaacttgaaaaagtggcaccgagtcggtgcttttgcactcacactgcccagagtgaggattttt

SEQ ID NO: 6335 - RNA, 131 nt, synthetic construct
  source 1..131: mol_type = other RNA; note = pegRNA
aattctgcaatcctcactctgttttagagctagaaatagcaagttaaaataaggctagtccgttatcaacttgaaaaagtggcaccgagtcggtgccactcacactgaccagagtgaggattgcagatttt

SEQ ID NO: 6336 - RNA, 131 nt, synthetic construct
  source 1..131: mol_type = other RNA; note = pegRNA
aattctgcaatcctcactctgttttagagctagaaatagcaagttaaaataaggctagtccgttatcaacttgaaaaagtggcaccgagtcggtgccactcacactggccagagtgaggattgcagatttt

SEQ ID NO: 6337 - RNA, 131 nt, synthetic construct
  source 1..131: mol_type = other RNA; note = pegRNA
aattctgcaatcctcactctgttttagagctagaaatagcaagttaaaataaggctagtccgttatcaacttgaaaaagtggcaccgagtcggtgccttttttgcactcacactgaccagagtgaggattg

SEQ ID NO: 6338 - RNA, 131 nt, synthetic construct
  source 1..131: mol_type = other RNA; note = pegRNA
aattctgcaatcctcactctgttttagagctagaaatagcaagttaaaataaggctagtccgttatcaacttgaaaaagtggcaccgagtcggtgccttttttgcactcacactggccagagtgaggattg

SEQ ID NO: 6339 - RNA, 131 nt, synthetic construct
  source 1..131: mol_type = other RNA; note = pegRNA
aattctgcaatcctcactctgttttagagctagaaatagcaagttaaaataaggctagtccgttatcaacttgaaaaagtggcaccgagtcggtgcgcactcacactgaccagagtgaggattgcagtttt

SEQ ID NO: 6340 - RNA, 131 nt, synthetic construct
  source 1..131: mol_type = other RNA; note = pegRNA
aattctgcaatcctcactctgttttagagctagaaatagcaagttaaaataaggctagtccgttatcaacttgaaaaagtggcaccgagtcggtgcgcactcacactggccagagtgaggattgcagtttt

SEQ ID NO: 6341 - RNA, 131 nt, synthetic construct
  source 1..131: mol_type = other RNA; note = pegRNA
aattctgcaatcctcactctgttttagagctagaaatagcaagttaaaataaggctagtccgttatcaacttgaaaaagtggcaccgagtcggtgctcttttttgcactcacactgaccagagtgaggatt

SEQ ID NO: 6342 - RNA, 131 nt, synthetic construct
  source 1..131: mol_type = other RNA; note = pegRNA
aattctgcaatcctcactctgttttagagctagaaatagcaagttaaaataaggctagtccgttatcaacttgaaaaagtggcaccgagtcggtgctcttttttgcactcacactggccagagtgaggatt

SEQ ID NO: 6343 - RNA, 131 nt, synthetic construct
  source 1..131: mol_type = other RNA; note = pegRNA
aattctgcaatcctcactctgttttagagctagaaatagcaagttaaaataaggctagtccgttatcaacttgaaaaagtggcaccgagtcggtgctgcactcacactgaccagagtgaggattgcagaat

SEQ ID NO: 6344 - RNA, 131 nt, synthetic construct
  source 1..131: mol_type = other RNA; note = pegRNA
aattctgcaatcctcactctgttttagagctagaaatagcaagttaaaataaggctagtccgttatcaacttgaaaaagtggcaccgagtcggtgctgcactcacactgaccagagtgaggattgcatttt

SEQ ID NO: 6345 - RNA, 131 nt, synthetic construct
  source 1..131: mol_type = other RNA; note = pegRNA
aattctgcaatcctcactctgttttagagctagaaatagcaagttaaaataaggctagtccgttatcaacttgaaaaagtggcaccgagtcggtgctgcactcacactgcccagagtgaggattgcatttt

SEQ ID NO: 6346 - RNA, 131 nt, synthetic construct
  source 1..131: mol_type = other RNA; note = pegRNA
aattctgcaatcctcactctgttttagagctagaaatagcaagttaaaataaggctagtccgttatcaacttgaaaaagtggcaccgagtcggtgctgcactcacactggccagagtgaggattgcagaat

SEQ ID NO: 6347 - RNA, 131 nt, synthetic construct
  source 1..131: mol_type = other RNA; note = pegRNA
aattctgcaatcctcactctgttttagagctagaaatagcaagttaaaataaggctagtccgttatcaacttgaaaaagtggcaccgagtcggtgctgcactcacactggccagagtgaggattgcatttt

SEQ ID NO: 6348 - RNA, 131 nt, synthetic construct
  source 1..131: mol_type = other RNA; note = pegRNA
aattctgcaatcctcactctgttttagagctagaaatagcaagttaaaataaggctagtccgttatcaacttgaaaaagtggcaccgagtcggtgcttcttttttgcactcacactgaccagagtgaggat

SEQ ID NO: 6349 - RNA, 131 nt, synthetic construct
  source 1..131: mol_type = other RNA; note = pegRNA
aattctgcaatcctcactctgttttagagctagaaatagcaagttaaaataaggctagtccgttatcaacttgaaaaagtggcaccgagtcggtgcttcttttttgcactcacactggccagagtgaggat

SEQ ID NO: 6350 - RNA, 131 nt, synthetic construct
  source 1..131: mol_type = other RNA; note = pegRNA
aattctgcaatcctcactctgttttagagctagaaatagcaagttaaaataaggctagtccgttatcaacttgaaaaagtggcaccgagtcggtgcttgcactcacactgaccagagtgaggattgcagaa

SEQ ID NO: 6351 - RNA, 131 nt, synthetic construct
  source 1..131: mol_type = other RNA; note = pegRNA
aattctgcaatcctcactctgttttagagctagaaatagcaagttaaaataaggctagtccgttatcaacttgaaaaagtggcaccgagtcggtgcttgcactcacactgaccagagtgaggattgctttt

SEQ ID NO: 6352 - RNA, 131 nt, synthetic construct
  source 1..131: mol_type = other RNA; note = pegRNA
aattctgcaatcctcactctgttttagagctagaaatagcaagttaaaataaggctagtccgttatcaacttgaaaaagtggcaccgagtcggtgcttgcactcacactggccagagtgaggattgcagaa

SEQ ID NO: 6353 - RNA, 131 nt, synthetic construct
  source 1..131: mol_type = other RNA; note = pegRNA
aattctgcaatcctcactctgttttagagctagaaatagcaagttaaaataaggctagtccgttatcaacttgaaaaagtggcaccgagtcggtgcttgcactcacactggccagagtgaggattgctttt

SEQ ID NO: 6354 - RNA, 131 nt, synthetic construct
  source 1..131: mol_type = other RNA; note = pegRNA
aattctgcaatcctcactctgttttagagctagaaatagcaagttaaaataaggctagtccgttatcaacttgaaaaagtggcaccgagtcggtgctttgcactcacactgaccagagtgaggattgcaga

SEQ ID NO: 6355 - RNA, 131 nt, synthetic construct
  source 1..131: mol_type = other RNA; note = pegRNA
aattctgcaatcctcactctgttttagagctagaaatagcaagttaaaataaggctagtccgttatcaacttgaaaaagtggcaccgagtcggtgctttgcactcacactgaccagagtgaggattgtttt

SEQ ID NO: 6356 - RNA, 131 nt, synthetic construct
  source 1..131: mol_type = other RNA; note = pegRNA
aattctgcaatcctcactctgttttagagctagaaatagcaagttaaaataaggctagtccgttatcaacttgaaaaagtggcaccgagtcggtgctttgcactcacactgcccagagtgaggattgcaga

SEQ ID NO: 6357 - RNA, 131 nt, synthetic construct
  source 1..131: mol_type = other RNA; note = pegRNA
aattctgcaatcctcactctgttttagagctagaaatagcaagttaaaataaggctagtccgttatcaacttgaaaaagtggcaccgagtcggtgctttgcactcacactgcccagagtgaggattgtttt

SEQ ID NO: 6358 - RNA, 131 nt, synthetic construct
  source 1..131: mol_type = other RNA; note = pegRNA
aattctgcaatcctcactctgttttagagctagaaatagcaagttaaaataaggctagtccgttatcaacttgaaaaagtggcaccgagtcggtgctttgcactcacactggccagagtgaggattgcaga

SEQ ID NO: 6359 - RNA, 131 nt, synthetic construct
  source 1..131: mol_type = other RNA; note = pegRNA
aattctgcaatcctcactctgttttagagctagaaatagcaagttaaaataaggctagtccgttatcaacttgaaaaagtggcaccgagtcggtgctttgcactcacactggccagagtgaggattgtttt

SEQ ID NO: 6360 - RNA, 131 nt, synthetic construct
  source 1..131: mol_type = other RNA; note = pegRNA
aattctgcaatcctcactctgttttagagctagaaatagcaagttaaaataaggctagtccgttatcaacttgaaaaagtggcaccgagtcggtgcttttgcactcacactgaccagagtgaggattgcag

SEQ ID NO: 6361 - RNA, 131 nt, synthetic construct
  source 1..131: mol_type = other RNA; note = pegRNA
aattctgcaatcctcactctgttttagagctagaaatagcaagttaaaataaggctagtccgttatcaacttgaaaaagtggcaccgagtcggtgcttttgcactcacactgaccagagtgaggatttttt

SEQ ID NO: 6362 - RNA, 131 nt, synthetic construct
  source 1..131: mol_type = other RNA; note = pegRNA
aattctgcaatcctcactctgttttagagctagaaatagcaagttaaaataaggctagtccgttatcaacttgaaaaagtggcaccgagtcggtgcttttgcactcacactggccagagtgaggattgcag

SEQ ID NO: 6363 - RNA, 131 nt, synthetic construct
  source 1..131: mol_type = other RNA; note = pegRNA
aattctgcaatcctcactctgttttagagctagaaatagcaagttaaaataaggctagtccgttatcaacttgaaaaagtggcaccgagtcggtgcttttgcactcacactggccagagtgaggatttttt

SEQ ID NO: 6364 - RNA, 131 nt, synthetic construct
  source 1..131: mol_type = other RNA; note = pegRNA
aattctgcaatcctcactctgttttagagctagaaatagcaagttaaaataaggctagtccgttatcaacttgaaaaagtggcaccgagtcggtgctttttgcactcacactgaccagagtgaggattgca

SEQ ID NO: 6365 - RNA, 131 nt, synthetic construct
  source 1..131: mol_type = other RNA; note = pegRNA
aattctgcaatcctcactctgttttagagctagaaatagcaagttaaaataaggctagtccgttatcaacttgaaaaagtggcaccgagtcggtgctttttgcactcacactgaccagagtgaggattttt

SEQ ID NO: 6366 - RNA, 131 nt, synthetic construct
  source 1..131: mol_type = other RNA; note = pegRNA
aattctgcaatcctcactctgttttagagctagaaatagcaagttaaaataaggctagtccgttatcaacttgaaaaagtggcaccgagtcggtgctttttgcactcacactggccagagtgaggattgca

SEQ ID NO: 6367 - RNA, 131 nt, synthetic construct
  source 1..131: mol_type = other RNA; note = pegRNA
aattctgcaatcctcactctgttttagagctagaaatagcaagttaaaataaggctagtccgttatcaacttgaaaaagtggcaccgagtcggtgctttttgcactcacactggccagagtgaggattttt

SEQ ID NO: 6368 - RNA, 131 nt, synthetic construct
  source 1..131: mol_type = other RNA; note = pegRNA
aattctgcaatcctcactctgttttagagctagaaatagcaagttaaaataaggctagtccgttatcaacttgaaaaagtggcaccgagtcggtgcttttttgcactcacactgaccagagtgaggattgc

SEQ ID NO: 6369 - RNA, 131 nt, synthetic construct
  source 1..131: mol_type = other RNA; note = pegRNA
aattctgcaatcctcactctgttttagagctagaaatagcaagttaaaataaggctagtccgttatcaacttgaaaaagtggcaccgagtcggtgcttttttgcactcacactggccagagtgaggattgc

SEQ ID NO: 6370 - RNA, 131 nt, synthetic construct
  source 1..131: mol_type = other RNA; note = pegRNA
aattctgcaatcctcactctgttttagagctagaaatagcaagttaaaataaggctagtccgttatcaacttgaaaaagtggcaccgagtcggtgcgcactcacactgcccagagtgaggattgcagtttt

SEQ ID NO: 6371 - RNA, 131 nt, synthetic construct
  source 1..131: mol_type = other RNA; note = pegRNA
aattctgcaatcctcactctgttttagagctagaaatagcaagttaaaataaggctagtccgttatcaacttgaaaaagtggcaccgagtcggtgcttgcactcacactgcccagagtgaggattgctttt

SEQ ID NO: 6372 - RNA, 131 nt, synthetic construct
  source 1..131: mol_type = other RNA; note = pegRNA
aattctgcaatcctcactctgttttagagctagaaatagcaagttaaaataaggctagtccgttatcaacttgaaaaagtggcaccgagtcggtgcttttgcactcacactgcccagagtgaggattgcag

SEQ ID NO: 6373 - RNA, 131 nt, synthetic construct
  source 1..131: mol_type = other RNA; note = pegRNA
aattctgcaatcctcactctgttttagagctagaaatagcaagttaaaataaggctagtccgttatcaacttgaaaaagtggcaccgagtcggtgcttttgcactcacactgcccagagtgaggatttttt

SEQ ID NO: 6374 - RNA, 132 nt, synthetic construct
  source 1..132: mol_type = other RNA; note = pegRNA
aattctgcaatcctcactctgttttagagctagaaatagcaagttaaaataaggctagtccgttatcaacttgaaaaagtggcaccgagtcggtgccactcacactgaccagagtgaggattgcagaatttt

SEQ ID NO: 6375 - RNA, 132 nt, synthetic construct
  source 1..132: mol_type = other RNA; note = pegRNA
aattctgcaatcctcactctgttttagagctagaaatagcaagttaaaataaggctagtccgttatcaacttgaaaaagtggcaccgagtcggtgccactcacactggccagagtgaggattgcagaatttt

SEQ ID NO: 6376 - RNA, 132 nt, synthetic construct
  source 1..132: mol_type = other RNA; note = pegRNA
aattctgcaatcctcactctgttttagagctagaaatagcaagttaaaataaggctagtccgttatcaacttgaaaaagtggcaccgagtcggtgccttcttttttgcactcacactgaccagagtgaggat

SEQ ID NO: 6377 - RNA, 132 nt, synthetic construct
  source 1..132: mol_type = other RNA; note = pegRNA
aattctgcaatcctcactctgttttagagctagaaatagcaagttaaaataaggctagtccgttatcaacttgaaaaagtggcaccgagtcggtgccttcttttttgcactcacactggccagagtgaggat

SEQ ID NO: 6378 - RNA, 132 nt, synthetic construct
  source 1..132: mol_type = other RNA; note = pegRNA
aattctgcaatcctcactctgttttagagctagaaatagcaagttaaaataaggctagtccgttatcaacttgaaaaagtggcaccgagtcggtgccttttttgcactcacactgaccagagtgaggattgc

SEQ ID NO: 6379 - RNA, 132 nt, synthetic construct
  source 1..132: mol_type = other RNA; note = pegRNA
aattctgcaatcctcactctgttttagagctagaaatagcaagttaaaataaggctagtccgttatcaacttgaaaaagtggcaccgagtcggtgccttttttgcactcacactggccagagtgaggattgc

SEQ ID NO: 6380 - RNA, 132 nt, synthetic construct
  source 1..132: mol_type = other RNA; note = pegRNA
aattctgcaatcctcactctgttttagagctagaaatagcaagttaaaataaggctagtccgttatcaacttgaaaaagtggcaccgagtcggtgcgcactcacactgaccagagtgaggattgcagatttt

SEQ ID NO: 6381 - RNA, 132 nt, synthetic construct
  source 1..132: mol_type = other RNA; note = pegRNA
aattctgcaatcctcactctgttttagagctagaaatagcaagttaaaataaggctagtccgttatcaacttgaaaaagtggcaccgagtcggtgcgcactcacactgcccagagtgaggattgcagatttt

SEQ ID NO: 6382 - RNA, 132 nt, synthetic construct
  source 1..132: mol_type = other RNA; note = pegRNA
aattctgcaatcctcactctgttttagagctagaaatagcaagttaaaataaggctagtccgttatcaacttgaaaaagtggcaccgagtcggtgcgcactcacactggccagagtgaggattgcagatttt

SEQ ID NO: 6383 - RNA, 132 nt, synthetic construct
  source 1..132: mol_type = other RNA; note = pegRNA
aattctgcaatcctcactctgttttagagctagaaatagcaagttaaaataaggctagtccgttatcaacttgaaaaagtggcaccgagtcggtgctcttttttgcactcacactgaccagagtgaggattg

SEQ ID NO: 6384 - RNA, 132 nt, synthetic construct
  source 1..132: mol_type = other RNA; note = pegRNA
aattctgcaatcctcactctgttttagagctagaaatagcaagttaaaataaggctagtccgttatcaacttgaaaaagtggcaccgagtcggtgctcttttttgcactcacactggccagagtgaggattg

SEQ ID NO: 6385 - RNA, 132 nt, synthetic construct
  source 1..132: mol_type = other RNA; note = pegRNA
aattctgcaatcctcactctgttttagagctagaaatagcaagttaaaataaggctagtccgttatcaacttgaaaaagtggcaccgagtcggtgctgcactcacactgaccagagtgaggattgcagtttt

SEQ ID NO: 6386 - RNA, 132 nt, synthetic construct
  source 1..132: mol_type = other RNA; note = pegRNA
aattctgcaatcctcactctgttttagagctagaaatagcaagttaaaataaggctagtccgttatcaacttgaaaaagtggcaccgagtcggtgctgcactcacactggccagagtgaggattgcagtttt

SEQ ID NO: 6387 - RNA, 132 nt, synthetic construct
  source 1..132: mol_type = other RNA; note = pegRNA
aattctgcaatcctcactctgttttagagctagaaatagcaagttaaaataaggctagtccgttatcaacttgaaaaagtggcaccgagtcggtgcttcttttttgcactcacactgaccagagtgaggatt

SEQ ID NO: 6388 - RNA, 132 nt, synthetic construct
  source 1..132: mol_type = other RNA; note = pegRNA
aattctgcaatcctcactctgttttagagctagaaatagcaagttaaaataaggctagtccgttatcaacttgaaaaagtggcaccgagtcggtgcttcttttttgcactcacactggccagagtgaggatt

SEQ ID NO: 6389 - RNA, 132 nt, synthetic construct
  source 1..132: mol_type = other RNA; note = pegRNA
aattctgcaatcctcactctgttttagagctagaaatagcaagttaaaataaggctagtccgttatcaacttgaaaaagtggcaccgagtcggtgcttgcactcacactgaccagagtgaggattgcagaat

SEQ ID NO: 6390 - RNA, 132 nt, synthetic construct
  source 1..132: mol_type = other RNA; note = pegRNA
aattctgcaatcctcactctgttttagagctagaaatagcaagttaaaataaggctagtccgttatcaacttgaaaaagtggcaccgagtcggtgcttgcactcacactgaccagagtgaggattgcatttt

SEQ ID NO: 6391 - RNA, 132 nt, synthetic construct
  source 1..132: mol_type = other RNA; note = pegRNA
aattctgcaatcctcactctgttttagagctagaaatagcaagttaaaataaggctagtccgttatcaacttgaaaaagtggcaccgagtcggtgcttgcactcacactggccagagtgaggattgcagaat

SEQ ID NO: 6392 - RNA, 132 nt, synthetic construct
  source 1..132: mol_type = other RNA; note = pegRNA
aattctgcaatcctcactctgttttagagctagaaatagcaagttaaaataaggctagtccgttatcaacttgaaaaagtggcaccgagtcggtgcttgcactcacactggccagagtgaggattgcatttt

SEQ ID NO: 6393 - RNA, 132 nt, synthetic construct
  source 1..132: mol_type = other RNA; note = pegRNA
aattctgcaatcctcactctgttttagagctagaaatagcaagttaaaataaggctagtccgttatcaacttgaaaaagtggcaccgagtcggtgctttgcactcacactgaccagagtgaggattgcagaa

SEQ ID NO: 6394 - RNA, 132 nt, synthetic construct
  source 1..132: mol_type = other RNA; note = pegRNA
aattctgcaatcctcactctgttttagagctagaaatagcaagttaaaataaggctagtccgttatcaacttgaaaaagtggcaccgagtcggtgctttgcactcacactgaccagagtgaggattgctttt

SEQ ID NO: 6395 - RNA, 132 nt, synthetic construct
  source 1..132: mol_type = other RNA; note = pegRNA
aattctgcaatcctcactctgttttagagctagaaatagcaagttaaaataaggctagtccgttatcaacttgaaaaagtggcaccgagtcggtgctttgcactcacactggccagagtgaggattgcagaa

SEQ ID NO: 6396 - RNA, 132 nt, synthetic construct
  source 1..132: mol_type = other RNA; note = pegRNA
aattctgcaatcctcactctgttttagagctagaaatagcaagttaaaataaggctagtccgttatcaacttgaaaaagtggcaccgagtcggtgctttgcactcacactggccagagtgaggattgctttt

SEQ ID NO: 6397 - RNA, 132 nt, synthetic construct
  source 1..132: mol_type = other RNA; note = pegRNA
aattctgcaatcctcactctgttttagagctagaaatagcaagttaaaataaggctagtccgttatcaacttgaaaaagtggcaccgagtcggtgcttttgcactcacactgaccagagtgaggattgcaga

SEQ ID NO: 6398 - RNA, 132 nt, synthetic construct
  source 1..132: mol_type = other RNA; note = pegRNA
aattctgcaatcctcactctgttttagagctagaaatagcaagttaaaataaggctagtccgttatcaacttgaaaaagtggcaccgagtcggtgcttttgcactcacactgaccagagtgaggattgtttt

SEQ ID NO: 6399 - RNA, 132 nt, synthetic construct
  source 1..132: mol_type = other RNA; note = pegRNA
aattctgcaatcctcactctgttttagagctagaaatagcaagttaaaataaggctagtccgttatcaacttgaaaaagtggcaccgagtcggtgcttttgcactcacactggccagagtgaggattgcaga

SEQ ID NO: 6400 - RNA, 132 nt, synthetic construct
  source 1..132: mol_type = other RNA; note = pegRNA
aattctgcaatcctcactctgttttagagctagaaatagcaagttaaaataaggctagtccgttatcaacttgaaaaagtggcaccgagtcggtgcttttgcactcacactggccagagtgaggattgtttt

SEQ ID NO: 6401 - RNA, 132 nt, synthetic construct
  source 1..132: mol_type = other RNA; note = pegRNA
aattctgcaatcctcactctgttttagagctagaaatagcaagttaaaataaggctagtccgttatcaacttgaaaaagtggcaccgagtcggtgctttttgcactcacactgaccagagtgaggattgcag

SEQ ID NO: 6402 - RNA, 132 nt, synthetic construct
  source 1..132: mol_type = other RNA; note = pegRNA
aattctgcaatcctcactctgttttagagctagaaatagcaagttaaaataaggctagtccgttatcaacttgaaaaagtggcaccgagtcggtgctttttgcactcacactgaccagagtgaggatttttt

SEQ ID NO: 6403 - RNA, 132 nt, synthetic construct
  source 1..132: mol_type = other RNA; note = pegRNA
aattctgcaatcctcactctgttttagagctagaaatagcaagttaaaataaggctagtccgttatcaacttgaaaaagtggcaccgagtcggtgctttttgcactcacactggccagagtgaggattgcag

SEQ ID NO: 6404 - RNA, 132 nt, synthetic construct
  source 1..132: mol_type = other RNA; note = pegRNA
aattctgcaatcctcactctgttttagagctagaaatagcaagttaaaataaggctagtccgttatcaacttgaaaaagtggcaccgagtcggtgctttttgcactcacactggccagagtgaggatttttt

SEQ ID NO: 6405 - RNA, 132 nt, synthetic construct
  source 1..132: mol_type = other RNA; note = pegRNA
aattctgcaatcctcactctgttttagagctagaaatagcaagttaaaataaggctagtccgttatcaacttgaaaaagtggcaccgagtcggtgcttttttgcactcacactgaccagagtgaggattgca

SEQ ID NO: 6406 - RNA, 132 nt, synthetic construct
  source 1..132: mol_type = other RNA; note = pegRNA
aattctgcaatcctcactctgttttagagctagaaatagcaagttaaaataaggctagtccgttatcaacttgaaaaagtggcaccgagtcggtgcttttttgcactcacactgaccagagtgaggattttt

SEQ ID NO: 6407 - RNA, 132 nt, synthetic construct
  source 1..132: mol_type = other RNA; note = pegRNA
aattctgcaatcctcactctgttttagagctagaaatagcaagttaaaataaggctagtccgttatcaacttgaaaaagtggcaccgagtcggtgcttttttgcactcacactggccagagtgaggattgca

SEQ ID NO: 6408 - RNA, 132 nt, synthetic construct
  source 1..132: mol_type = other RNA; note = pegRNA
aattctgcaatcctcactctgttttagagctagaaatagcaagttaaaataaggctagtccgttatcaacttgaaaaagtggcaccgagtcggtgcttttttgcactcacactggccagagtgaggattttt

SEQ ID NO: 6409 - RNA, 132 nt, synthetic construct
  source 1..132: mol_type = other RNA; note = pegRNA
aattctgcaatcctcactctgttttagagctagaaatagcaagttaaaataaggctagtccgttatcaacttgaaaaagtggcaccgagtcggtgctgcactcacactgcccagagtgaggattgcagtttt

SEQ ID NO: 6410 - RNA, 132 nt, synthetic construct
  source 1..132: mol_type = other RNA; note = pegRNA
aattctgcaatcctcactctgttttagagctagaaatagcaagttaaaataaggctagtccgttatcaacttgaaaaagtggcaccgagtcggtgcttgcactcacactgcccagagtgaggattgcatttt

SEQ ID NO: 6411 - RNA, 132 nt, synthetic construct
  source 1..132: mol_type = other RNA; note = pegRNA
aattctgcaatcctcactctgttttagagctagaaatagcaagttaaaataaggctagtccgttatcaacttgaaaaagtggcaccgagtcggtgctttgcactcacactgcccagagtgaggattgctttt

SEQ ID NO: 6412 - RNA, 132 nt, synthetic construct
  source 1..132: mol_type = other RNA; note = pegRNA
aattctgcaatcctcactctgttttagagctagaaatagcaagttaaaataaggctagtccgttatcaacttgaaaaagtggcaccgagtcggtgcttttgcactcacactgcccagagtgaggattgtttt

SEQ ID NO: 6413 - RNA, 133 nt, synthetic construct
  source 1..133: mol_type = other RNA; note = pegRNA
aattctgcaatcctcactctgttttagagctagaaatagcaagttaaaataaggctagtccgttatcaacttgaaaaagtggcaccgagtcggtgccactcacactgaccagagtgaggattgcagaattttt

SEQ ID NO: 6414 - RNA, 133 nt, synthetic construct
  source 1..133: mol_type = other RNA; note = pegRNA
aattctgcaatcctcactctgttttagagctagaaatagcaagttaaaataaggctagtccgttatcaacttgaaaaagtggcaccgagtcggtgccactcacactggccagagtgaggattgcagaattttt

SEQ ID NO: 6415 - RNA, 133 nt, synthetic construct
  source 1..133: mol_type = other RNA; note = pegRNA
aattctgcaatcctcactctgttttagagctagaaatagcaagttaaaataaggctagtccgttatcaacttgaaaaagtggcaccgagtcggtgccttcttttttgcactcacactgaccagagtgaggatt

SEQ ID NO: 6416 - RNA, 133 nt, synthetic construct
  source 1..133: mol_type = other RNA; note = pegRNA
aattctgcaatcctcactctgttttagagctagaaatagcaagttaaaataaggctagtccgttatcaacttgaaaaagtggcaccgagtcggtgccttcttttttgcactcacactggccagagtgaggatt

SEQ ID NO: 6417 - RNA, 133 nt, synthetic construct
  source 1..133: mol_type = other RNA; note = pegRNA
aattctgcaatcctcactctgttttagagctagaaatagcaagttaaaataaggctagtccgttatcaacttgaaaaagtggcaccgagtcggtgccttttttgcactcacactgaccagagtgaggattgca

SEQ ID NO: 6418 - RNA, 133 nt, synthetic construct
  source 1..133: mol_type = other RNA; note = pegRNA
aattctgcaatcctcactctgttttagagctagaaatagcaagttaaaataaggctagtccgttatcaacttgaaaaagtggcaccgagtcggtgccttttttgcactcacactgaccagagtgaggattttt

SEQ ID NO: 6419 - RNA, 133 nt, synthetic construct
  source 1..133: mol_type = other RNA; note = pegRNA
aattctgcaatcctcactctgttttagagctagaaatagcaagttaaaataaggctagtccgttatcaacttgaaaaagtggcaccgagtcggtgccttttttgcactcacactggccagagtgaggattgca

SEQ ID NO: 6420 - RNA, 133 nt, synthetic construct
  source 1..133: mol_type = other RNA; note = pegRNA
aattctgcaatcctcactctgttttagagctagaaatagcaagttaaaataaggctagtccgttatcaacttgaaaaagtggcaccgagtcggtgccttttttgcactcacactggccagagtgaggattttt

SEQ ID NO: 6421 - RNA, 133 nt, synthetic construct
  source 1..133: mol_type = other RNA; note = pegRNA
aattctgcaatcctcactctgttttagagctagaaatagcaagttaaaataaggctagtccgttatcaacttgaaaaagtggcaccgagtcggtgcgcactcacactgaccagagtgaggattgcagaatttt

SEQ ID NO: 6422 - RNA, 133 nt, synthetic construct
  source 1..133: mol_type = other RNA; note = pegRNA
aattctgcaatcctcactctgttttagagctagaaatagcaagttaaaataaggctagtccgttatcaacttgaaaaagtggcaccgagtcggtgcgcactcacactggccagagtgaggattgcagaatttt

SEQ ID NO: 6423 - RNA, 133 nt, synthetic construct
  source 1..133: mol_type = other RNA; note = pegRNA
aattctgcaatcctcactctgttttagagctagaaatagcaagttaaaataaggctagtccgttatcaacttgaaaaagtggcaccgagtcggtgcgcttcttttttgcactcacactgaccagagtgaggat

SEQ ID NO: 6424 - RNA, 133 nt, synthetic construct
  source 1..133: mol_type = other RNA; note = pegRNA
aattctgcaatcctcactctgttttagagctagaaatagcaagttaaaataaggctagtccgttatcaacttgaaaaagtggcaccgagtcggtgcgcttcttttttgcactcacactggccagagtgaggat

SEQ ID NO: 6425 - RNA, 133 nt, synthetic construct
  source 1..133: mol_type = other RNA; note = pegRNA
aattctgcaatcctcactctgttttagagctagaaatagcaagttaaaataaggctagtccgttatcaacttgaaaaagtggcaccgagtcggtgctcttttttgcactcacactgaccagagtgaggattgc

SEQ ID NO: 6426 - RNA, 133 nt, synthetic construct
  source 1..133: mol_type = other RNA; note = pegRNA
aattctgcaatcctcactctgttttagagctagaaatagcaagttaaaataaggctagtccgttatcaacttgaaaaagtggcaccgagtcggtgctcttttttgcactcacactggccagagtgaggattgc

SEQ ID NO: 6427 - RNA, 133 nt, synthetic construct
  source 1..133: mol_type = other RNA; note = pegRNA
aattctgcaatcctcactctgttttagagctagaaatagcaagttaaaataaggctagtccgttatcaacttgaaaaagtggcaccgagtcggtgctgcactcacactgaccagagtgaggattgcagatttt

SEQ ID NO: 6428 - RNA, 133 nt, synthetic construct
  source 1..133: mol_type = other RNA; note = pegRNA
aattctgcaatcctcactctgttttagagctagaaatagcaagttaaaataaggctagtccgttatcaacttgaaaaagtggcaccgagtcggtgctgcactcacactgcccagagtgaggattgcagatttt

SEQ ID NO: 6429 - RNA, 133 nt, synthetic construct
  source 1..133: mol_type = other RNA; note = pegRNA
aattctgcaatcctcactctgttttagagctagaaatagcaagttaaaataaggctagtccgttatcaacttgaaaaagtggcaccgagtcggtgctgcactcacactggccagagtgaggattgcagatttt

SEQ ID NO: 6430 - RNA, 133 nt, synthetic construct
  source 1..133: mol_type = other RNA; note = pegRNA
aattctgcaatcctcactctgttttagagctagaaatagcaagttaaaataaggctagtccgttatcaacttgaaaaagtggcaccgagtcggtgcttcttttttgcactcacactgaccagagtgaggattg

SEQ ID NO: 6431 - RNA, 133 nt, synthetic construct
  source 1..133: mol_type = other RNA; note = pegRNA
aattctgcaatcctcactctgttttagagctagaaatagcaagttaaaataaggctagtccgttatcaacttgaaaaagtggcaccgagtcggtgcttcttttttgcactcacactggccagagtgaggattg

SEQ ID NO: 6432 - RNA, 133 nt, synthetic construct
  source 1..133: mol_type = other RNA; note = pegRNA
aattctgcaatcctcactctgttttagagctagaaatagcaagttaaaataaggctagtccgttatcaacttgaaaaagtggcaccgagtcggtgcttgcactcacactgaccagagtgaggattgcagtttt

SEQ ID NO: 6433 - RNA, 133 nt, synthetic construct
  source 1..133: mol_type = other RNA; note = pegRNA
aattctgcaatcctcactctgttttagagctagaaatagcaagttaaaataaggctagtccgttatcaacttgaaaaagtggcaccgagtcggtgcttgcactcacactggccagagtgaggattgcagtttt

SEQ ID NO: 6434 - RNA, 133 nt, synthetic construct
  source 1..133: mol_type = other RNA; note = pegRNA
aattctgcaatcctcactctgttttagagctagaaatagcaagttaaaataaggctagtccgttatcaacttgaaaaagtggcaccgagtcggtgctttgcactcacactgaccagagtgaggattgcagaat

SEQ ID NO: 6435 - RNA, 133 nt, synthetic construct
  source 1..133: mol_type = other RNA; note = pegRNA
aattctgcaatcctcactctgttttagagctagaaatagcaagttaaaataaggctagtccgttatcaacttgaaaaagtggcaccgagtcggtgctttgcactcacactgaccagagtgaggattgcatttt

SEQ ID NO: 6436 - RNA, 133 nt, synthetic construct
  source 1..133: mol_type = other RNA; note = pegRNA
aattctgcaatcctcactctgttttagagctagaaatagcaagttaaaataaggctagtccgttatcaacttgaaaaagtggcaccgagtcggtgctttgcactcacactgcccagagtgaggattgcatttt

SEQ ID NO: 6437 - RNA, 133 nt, synthetic construct
  source 1..133: mol_type = other RNA; note = pegRNA
aattctgcaatcctcactctgttttagagctagaaatagcaagttaaaataaggctagtccgttatcaacttgaaaaagtggcaccgagtcggtgctttgcactcacactggccagagtgaggattgcagaat

SEQ ID NO: 6438 - RNA, 133 nt, synthetic construct
  source 1..133: mol_type = other RNA; note = pegRNA
aattctgcaatcctcactctgttttagagctagaaatagcaagttaaaataaggctagtccgttatcaacttgaaaaagtggcaccgagtcggtgctttgcactcacactggccagagtgaggattgcatttt

SEQ ID NO: 6439 - RNA, 133 nt, synthetic construct
  source 1..133: mol_type = other RNA; note = pegRNA
aattctgcaatcctcactctgttttagagctagaaatagcaagttaaaataaggctagtccgttatcaacttgaaaaagtggcaccgagtcggtgcttttgcactcacactgaccagagtgaggattgcagaa

SEQ ID NO: 6440 - RNA, 133 nt, synthetic construct
  source 1..133: mol_type = other RNA; note = pegRNA
aattctgcaatcctcactctgttttagagctagaaatagcaagttaaaataaggctagtccgttatcaacttgaaaaagtggcaccgagtcggtgcttttgcactcacactgaccagagtgaggattgctttt

SEQ ID NO: 6441 - RNA, 133 nt, synthetic construct
  source 1..133: mol_type = other RNA; note = pegRNA
aattctgcaatcctcactctgttttagagctagaaatagcaagttaaaataaggctagtccgttatcaacttgaaaaagtggcaccgagtcggtgcttttgcactcacactggccagagtgaggattgcagaa

SEQ ID NO: 6442 - RNA, 133 nt, synthetic construct
  source 1..133: mol_type = other RNA; note = pegRNA
aattctgcaatcctcactctgttttagagctagaaatagcaagttaaaataaggctagtccgttatcaacttgaaaaagtggcaccgagtcggtgcttttgcactcacactggccagagtgaggattgctttt

SEQ ID NO: 6443 - RNA, 133 nt, synthetic construct
  source 1..133: mol_type = other RNA; note = pegRNA
aattctgcaatcctcactctgttttagagctagaaatagcaagttaaaataaggctagtccgttatcaacttgaaaaagtggcaccgagtcggtgctttttgcactcacactgaccagagtgaggattgcaga

SEQ ID NO: 6444 - RNA, 133 nt, synthetic construct
  source 1..133: mol_type = other RNA; note = pegRNA
aattctgcaatcctcactctgttttagagctagaaatagcaagttaaaataaggctagtccgttatcaacttgaaaaagtggcaccgagtcggtgctttttgcactcacactgaccagagtgaggattgtttt

SEQ ID NO: 6445 - RNA, 133 nt, synthetic construct
  source 1..133: mol_type = other RNA; note = pegRNA
aattctgcaatcctcactctgttttagagctagaaatagcaagttaaaataaggctagtccgttatcaacttgaaaaagtggcaccgagtcggtgctttttgcactcacactggccagagtgaggattgcaga

SEQ ID NO: 6446 - RNA, 133 nt, synthetic construct
  source 1..133: mol_type = other RNA; note = pegRNA
aattctgcaatcctcactctgttttagagctagaaatagcaagttaaaataaggctagtccgttatcaacttgaaaaagtggcaccgagtcggtgctttttgcactcacactggccagagtgaggattgtttt

SEQ ID NO: 6447 - RNA, 133 nt, synthetic construct
  source 1..133: mol_type = other RNA; note = pegRNA
aattctgcaatcctcactctgttttagagctagaaatagcaagttaaaataaggctagtccgttatcaacttgaaaaagtggcaccgagtcggtgcttttttgcactcacactgaccagagtgaggattgcag

SEQ ID NO: 6448 - RNA, 133 nt, synthetic construct
  source 1..133: mol_type = other RNA; note = pegRNA
aattctgcaatcctcactctgttttagagctagaaatagcaagttaaaataaggctagtccgttatcaacttgaaaaagtggcaccgagtcggtgcttttttgcactcacactgaccagagtgaggatttttt

SEQ ID NO: 6449 - RNA, 133 nt, synthetic construct
  source 1..133: mol_type = other RNA; note = pegRNA
aattctgcaatcctcactctgttttagagctagaaatagcaagttaaaataaggctagtccgttatcaacttgaaaaagtggcaccgagtcggtgcttttttgcactcacactggccagagtgaggattgcag

SEQ ID NO: 6450 - RNA, 133 nt, synthetic construct
  source 1..133: mol_type = other RNA; note = pegRNA
aattctgcaatcctcactctgttttagagctagaaatagcaagttaaaataaggctagtccgttatcaacttgaaaaagtggcaccgagtcggtgcttttttgcactcacactggccagagtgaggatttttt

SEQ ID NO: 6451 - RNA, 133 nt, synthetic construct
  source 1..133: mol_type = other RNA; note = pegRNA
aattctgcaatcctcactctgttttagagctagaaatagcaagttaaaataaggctagtccgttatcaacttgaaaaagtggcaccgagtcggtgcttgcactcacactgcccagagtgaggattgcagtttt

SEQ ID NO: 6452 - RNA, 133 nt, synthetic construct
  source 1..133: mol_type = other RNA; note = pegRNA
aattctgcaatcctcactctgttttagagctagaaatagcaagttaaaataaggctagtccgttatcaacttgaaaaagtggcaccgagtcggtgcttttgcactcacactgcccagagtgaggattgctttt

SEQ ID NO: 6453 - RNA, 134 nt, synthetic construct
  source 1..134: mol_type = other RNA; note = pegRNA
aattctgcaatcctcactctgttttagagctagaaatagcaagttaaaataaggctagtccgttatcaacttgaaaaagtggcaccgagtcggtgccttcttttttgcactcacactgaccagagtgaggattg

SEQ ID NO: 6454 - RNA, 134 nt, synthetic construct
  source 1..134: mol_type = other RNA; note = pegRNA
aattctgcaatcctcactctgttttagagctagaaatagcaagttaaaataaggctagtccgttatcaacttgaaaaagtggcaccgagtcggtgccttcttttttgcactcacactggccagagtgaggattg

SEQ ID NO: 6455 - RNA, 134 nt, synthetic construct
  source 1..134: mol_type = other RNA; note = pegRNA
aattctgcaatcctcactctgttttagagctagaaatagcaagttaaaataaggctagtccgttatcaacttgaaaaagtggcaccgagtcggtgccttttttgcactcacactgaccagagtgaggattgcag

SEQ ID NO: 6456 - RNA, 134 nt, synthetic construct
  source 1..134: mol_type = other RNA; note = pegRNA
aattctgcaatcctcactctgttttagagctagaaatagcaagttaaaataaggctagtccgttatcaacttgaaaaagtggcaccgagtcggtgccttttttgcactcacactgaccagagtgaggatttttt

SEQ ID NO: 6457 - RNA, 134 nt, synthetic construct
  source 1..134: mol_type = other RNA; note = pegRNA
aattctgcaatcctcactctgttttagagctagaaatagcaagttaaaataaggctagtccgttatcaacttgaaaaagtggcaccgagtcggtgccttttttgcactcacactggccagagtgaggattgcag

SEQ ID NO: 6458 - RNA, 134 nt, synthetic construct
  source 1..134: mol_type = other RNA; note = pegRNA
aattctgcaatcctcactctgttttagagctagaaatagcaagttaaaataaggctagtccgttatcaacttgaaaaagtggcaccgagtcggtgccttttttgcactcacactggccagagtgaggatttttt

SEQ ID NO: 6459 - RNA, 134 nt, synthetic construct
  source 1..134: mol_type = other RNA; note = pegRNA
aattctgcaatcctcactctgttttagagctagaaatagcaagttaaaataaggctagtccgttatcaacttgaaaaagtggcaccgagtcggtgcgcactcacactgaccagagtgaggattgcagaattttt

SEQ ID NO: 6460 - RNA, 134 nt, synthetic construct
  source 1..134: mol_type = other RNA; note = pegRNA
aattctgcaatcctcactctgttttagagctagaaatagcaagttaaaataaggctagtccgttatcaacttgaaaaagtggcaccgagtcggtgcgcactcacactggccagagtgaggattgcagaattttt

SEQ ID NO: 6461 - RNA, 134 nt, synthetic construct
  source 1..134: mol_type = other RNA; note = pegRNA
aattctgcaatcctcactctgttttagagctagaaatagcaagttaaaataaggctagtccgttatcaacttgaaaaagtggcaccgagtcggtgcgcttcttttttgcactcacactgaccagagtgaggatt

SEQ ID NO: 6462 - RNA, 134 nt, synthetic construct
  source 1..134: mol_type = other RNA; note = pegRNA
aattctgcaatcctcactctgttttagagctagaaatagcaagttaaaataaggctagtccgttatcaacttgaaaaagtggcaccgagtcggtgcgcttcttttttgcactcacactggccagagtgaggatt

SEQ ID NO: 6463 - RNA, 134 nt, synthetic construct
  source 1..134: mol_type = other RNA; note = pegRNA
aattctgcaatcctcactctgttttagagctagaaatagcaagttaaaataaggctagtccgttatcaacttgaaaaagtggcaccgagtcggtgcggcttcttttttgcactcacactgaccagagtgaggat

SEQ ID NO: 6464 - RNA, 134 nt, synthetic construct
  source 1..134: mol_type = other RNA; note = pegRNA
aattctgcaatcctcactctgttttagagctagaaatagcaagttaaaataaggctagtccgttatcaacttgaaaaagtggcaccgagtcggtgcggcttcttttttgcactcacactggccagagtgaggat

SEQ ID NO: 6465 - RNA, 134 nt, synthetic construct
  source 1..134: mol_type = other RNA; note = pegRNA
aattctgcaatcctcactctgttttagagctagaaatagcaagttaaaataaggctagtccgttatcaacttgaaaaagtggcaccgagtcggtgctcttttttgcactcacactgaccagagtgaggattgca

SEQ ID NO: 6466 - RNA, 134 nt, synthetic construct
  source 1..134: mol_type = other RNA; note = pegRNA
aattctgcaatcctcactctgttttagagctagaaatagcaagttaaaataaggctagtccgttatcaacttgaaaaagtggcaccgagtcggtgctcttttttgcactcacactgaccagagtgaggattttt

SEQ ID NO: 6467 - RNA, 134 nt, synthetic construct
  source 1..134: mol_type = other RNA; note = pegRNA
aattctgcaatcctcactctgttttagagctagaaatagcaagttaaaataaggctagtccgttatcaacttgaaaaagtggcaccgagtcggtgctcttttttgcactcacactggccagagtgaggattgca

SEQ ID NO: 6468 - RNA, 134 nt, synthetic construct
  source 1..134: mol_type = other RNA; note = pegRNA
aattctgcaatcctcactctgttttagagctagaaatagcaagttaaaataaggctagtccgttatcaacttgaaaaagtggcaccgagtcggtgctcttttttgcactcacactggccagagtgaggattttt

SEQ ID NO: 6469 - RNA, 134 nt, synthetic construct
  source 1..134: mol_type = other RNA; note = pegRNA
aattctgcaatcctcactctgttttagagctagaaatagcaagttaaaataaggctagtccgttatcaacttgaaaaagtggcaccgagtcggtgctgcactcacactgaccagagtgaggattgcagaatttt

SEQ ID NO: 6470 - RNA, 134 nt, synthetic construct
  source 1..134: mol_type = other RNA; note = pegRNA
aattctgcaatcctcactctgttttagagctagaaatagcaagttaaaataaggctagtccgttatcaacttgaaaaagtggcaccgagtcggtgctgcactcacactggccagagtgaggattgcagaatttt

SEQ ID NO: 6471 - RNA, 134 nt, synthetic construct
  source 1..134: mol_type = other RNA; note = pegRNA
aattctgcaatcctcactctgttttagagctagaaatagcaagttaaaataaggctagtccgttatcaacttgaaaaagtggcaccgagtcggtgcttcttttttgcactcacactgaccagagtgaggattgc

SEQ ID NO: 6472 - RNA, 134 nt, synthetic construct
  source 1..134: mol_type = other RNA; note = pegRNA
aattctgcaatcctcactctgttttagagctagaaatagcaagttaaaataaggctagtccgttatcaacttgaaaaagtggcaccgagtcggtgcttcttttttgcactcacactggccagagtgaggattgc

SEQ ID NO: 6473 - RNA, 134 nt, synthetic construct
  source 1..134: mol_type = other RNA; note = pegRNA
aattctgcaatcctcactctgttttagagctagaaatagcaagttaaaataaggctagtccgttatcaacttgaaaaagtggcaccgagtcggtgcttgcactcacactgaccagagtgaggattgcagatttt

SEQ ID NO: 6474 - RNA, 134 nt, synthetic construct
  source 1..134: mol_type = other RNA; note = pegRNA
aattctgcaatcctcactctgttttagagctagaaatagcaagttaaaataaggctagtccgttatcaacttgaaaaagtggcaccgagtcggtgcttgcactcacactggccagagtgaggattgcagatttt

SEQ ID NO: 6475 - RNA, 134 nt, synthetic construct
  source 1..134: mol_type = other RNA; note = pegRNA
aattctgcaatcctcactctgttttagagctagaaatagcaagttaaaataaggctagtccgttatcaacttgaaaaagtggcaccgagtcggtgctttgcactcacactgaccagagtgaggattgcagtttt

SEQ ID NO: 6476 - RNA, 134 nt, synthetic construct
  source 1..134: mol_type = other RNA; note = pegRNA
aattctgcaatcctcactctgttttagagctagaaatagcaagttaaaataaggctagtccgttatcaacttgaaaaagtggcaccgagtcggtgctttgcactcacactggccagagtgaggattgcagtttt

SEQ ID NO: 6477 - RNA, 134 nt, synthetic construct
  source 1..134: mol_type = other RNA; note = pegRNA
aattctgcaatcctcactctgttttagagctagaaatagcaagttaaaataaggctagtccgttatcaacttgaaaaagtggcaccgagtcggtgcttttgcactcacactgaccagagtgaggattgcagaat

SEQ ID NO: 6478 - RNA, 134 nt, synthetic construct
  source 1..134: mol_type = other RNA; note = pegRNA
aattctgcaatcctcactctgttttagagctagaaatagcaagttaaaataaggctagtccgttatcaacttgaaaaagtggcaccgagtcggtgcttttgcactcacactgaccagagtgaggattgcatttt

SEQ ID NO: 6479 - RNA, 134 nt, synthetic construct
  source 1..134: mol_type = other RNA; note = pegRNA
aattctgcaatcctcactctgttttagagctagaaatagcaagttaaaataaggctagtccgttatcaacttgaaaaagtggcaccgagtcggtgcttttgcactcacactggccagagtgaggattgcagaat

SEQ ID NO: 6480 - RNA, 134 nt, synthetic construct
  source 1..134: mol_type = other RNA; note = pegRNA
aattctgcaatcctcactctgttttagagctagaaatagcaagttaaaataaggctagtccgttatcaacttgaaaaagtggcaccgagtcggtgcttttgcactcacactggccagagtgaggattgcatttt

SEQ ID NO: 6481 - RNA, 134 nt, synthetic construct
  source 1..134: mol_type = other RNA; note = pegRNA
aattctgcaatcctcactctgttttagagctagaaatagcaagttaaaataaggctagtccgttatcaacttgaaaaagtggcaccgagtcggtgctttttgcactcacactgaccagagtgaggattgcagaa

SEQ ID NO: 6482 - RNA, 134 nt, synthetic construct
  source 1..134: mol_type = other RNA; note = pegRNA
aattctgcaatcctcactctgttttagagctagaaatagcaagttaaaataaggctagtccgttatcaacttgaaaaagtggcaccgagtcggtgctttttgcactcacactgaccagagtgaggattgctttt

SEQ ID NO: 6483 - RNA, 134 nt, synthetic construct
  source 1..134: mol_type = other RNA; note = pegRNA
aattctgcaatcctcactctgttttagagctagaaatagcaagttaaaataaggctagtccgttatcaacttgaaaaagtggcaccgagtcggtgctttttgcactcacactggccagagtgaggattgcagaa

SEQ ID NO: 6484 - RNA, 134 nt, synthetic construct
  source 1..134: mol_type = other RNA; note = pegRNA
aattctgcaatcctcactctgttttagagctagaaatagcaagttaaaataaggctagtccgttatcaacttgaaaaagtggcaccgagtcggtgctttttgcactcacactggccagagtgaggattgctttt

SEQ ID NO: 6485 - RNA, 134 nt, synthetic construct
  source 1..134: mol_type = other RNA; note = pegRNA
aattctgcaatcctcactctgttttagagctagaaatagcaagttaaaataaggctagtccgttatcaacttgaaaaagtggcaccgagtcggtgcttttttgcactcacactgaccagagtgaggattgcaga

SEQ ID NO: 6486 - RNA, 134 nt, synthetic construct
  source 1..134: mol_type = other RNA; note = pegRNA
aattctgcaatcctcactctgttttagagctagaaatagcaagttaaaataaggctagtccgttatcaacttgaaaaagtggcaccgagtcggtgcttttttgcactcacactgaccagagtgaggattgtttt

SEQ ID NO: 6487 - RNA, 134 nt, synthetic construct
  source 1..134: mol_type = other RNA; note = pegRNA
aattctgcaatcctcactctgttttagagctagaaatagcaagttaaaataaggctagtccgttatcaacttgaaaaagtggcaccgagtcggtgcttttttgcactcacactggccagagtgaggattgcaga

SEQ ID NO: 6488 - RNA, 134 nt, synthetic construct
  source 1..134: mol_type = other RNA; note = pegRNA
aattctgcaatcctcactctgttttagagctagaaatagcaagttaaaataaggctagtccgttatcaacttgaaaaagtggcaccgagtcggtgcttttttgcactcacactggccagagtgaggattgtttt

SEQ ID NO: 6489 - RNA, 134 nt, synthetic construct
  source 1..134: mol_type = other RNA; note = pegRNA
aattctgcaatcctcactctgttttagagctagaaatagcaagttaaaataaggctagtccgttatcaacttgaaaaagtggcaccgagtcggtgctttgcactcacactgcccagagtgaggattgcagtttt

SEQ ID NO: 6490 - RNA, 134 nt, synthetic construct
  source 1..134: mol_type = other RNA; note = pegRNA
aattctgcaatcctcactctgttttagagctagaaatagcaagttaaaataaggctagtccgttatcaacttgaaaaagtggcaccgagtcggtgcttttgcactcacactgcccagagtgaggattgcatttt

SEQ ID NO: 6491 - RNA, 135 nt, synthetic construct
  source 1..135: mol_type = other RNA; note = pegRNA
aattctgcaatcctcactctgttttagagctagaaatagcaagttaaaataaggctagtccgttatcaacttgaaaaagtggcaccgagtcggtgccttcttttttgcactcacactgaccagagtgaggattgc

SEQ ID NO: 6492 - RNA, 135 nt, synthetic construct
  source 1..135: mol_type = other RNA; note = pegRNA
aattctgcaatcctcactctgttttagagctagaaatagcaagttaaaataaggctagtccgttatcaacttgaaaaagtggcaccgagtcggtgccttcttttttgcactcacactggccagagtgaggattgc

SEQ ID NO: 6493 - RNA, 135 nt, synthetic construct
  source 1..135: mol_type = other RNA; note = pegRNA
aattctgcaatcctcactctgttttagagctagaaatagcaagttaaaataaggctagtccgttatcaacttgaaaaagtggcaccgagtcggtgccttttttgcactcacactgaccagagtgaggattgcaga

SEQ ID NO: 6494 - RNA, 135 nt, synthetic construct
  source 1..135: mol_type = other RNA; note = pegRNA
aattctgcaatcctcactctgttttagagctagaaatagcaagttaaaataaggctagtccgttatcaacttgaaaaagtggcaccgagtcggtgccttttttgcactcacactgaccagagtgaggattgtttt

SEQ ID NO: 6495 - RNA, 135 nt, synthetic construct
  source 1..135: mol_type = other RNA; note = pegRNA
aattctgcaatcctcactctgttttagagctagaaatagcaagttaaaataaggctagtccgttatcaacttgaaaaagtggcaccgagtcggtgccttttttgcactcacactggccagagtgaggattgcaga

SEQ ID NO: 6496 - RNA, 135 nt, synthetic construct
  source 1..135: mol_type = other RNA; note = pegRNA
aattctgcaatcctcactctgttttagagctagaaatagcaagttaaaataaggctagtccgttatcaacttgaaaaagtggcaccgagtcggtgccttttttgcactcacactggccagagtgaggattgtttt

SEQ ID NO: 6497 - RNA, 135 nt, synthetic construct
  source 1..135: mol_type = other RNA; note = pegRNA
aattctgcaatcctcactctgttttagagctagaaatagcaagttaaaataaggctagtccgttatcaacttgaaaaagtggcaccgagtcggtgcgcttcttttttgcactcacactgaccagagtgaggattg

SEQ ID NO: 6498 - RNA, 135 nt, synthetic construct
  source 1..135: mol_type = other RNA; note = pegRNA
aattctgcaatcctcactctgttttagagctagaaatagcaagttaaaataaggctagtccgttatcaacttgaaaaagtggcaccgagtcggtgcgcttcttttttgcactcacactggccagagtgaggattg

SEQ ID NO: 6499 - RNA, 135 nt, synthetic construct
  source 1..135: mol_type = other RNA; note = pegRNA
aattctgcaatcctcactctgttttagagctagaaatagcaagttaaaataaggctagtccgttatcaacttgaaaaagtggcaccgagtcggtgcggcttcttttttgcactcacactgaccagagtgaggatt

SEQ ID NO: 6500 - RNA, 135 nt, synthetic construct
  source 1..135: mol_type = other RNA; note = pegRNA
aattctgcaatcctcactctgttttagagctagaaatagcaagttaaaataaggctagtccgttatcaacttgaaaaagtggcaccgagtcggtgcggcttcttttttgcactcacactggccagagtgaggatt

SEQ ID NO: 6501 - RNA, 135 nt, synthetic construct
  source 1..135: mol_type = other RNA; note = pegRNA
aattctgcaatcctcactctgttttagagctagaaatagcaagttaaaataaggctagtccgttatcaacttgaaaaagtggcaccgagtcggtgctcttttttgcactcacactgaccagagtgaggattgcag

SEQ ID NO: 6502 - RNA, 135 nt, synthetic construct
  source 1..135: mol_type = other RNA; note = pegRNA
aattctgcaatcctcactctgttttagagctagaaatagcaagttaaaataaggctagtccgttatcaacttgaaaaagtggcaccgagtcggtgctcttttttgcactcacactgaccagagtgaggatttttt

SEQ ID NO: 6503 - RNA, 135 nt, synthetic construct
  source 1..135: mol_type = other RNA; note = pegRNA
aattctgcaatcctcactctgttttagagctagaaatagcaagttaaaataaggctagtccgttatcaacttgaaaaagtggcaccgagtcggtgctcttttttgcactcacactggccagagtgaggattgcag

SEQ ID NO: 6504 - RNA, 135 nt, synthetic construct
  source 1..135: mol_type = other RNA; note = pegRNA
aattctgcaatcctcactctgttttagagctagaaatagcaagttaaaataaggctagtccgttatcaacttgaaaaagtggcaccgagtcggtgctcttttttgcactcacactggccagagtgaggatttttt

SEQ ID NO: 6505 - RNA, 135 nt, synthetic construct
  source 1..135: mol_type = other RNA; note = pegRNA
aattctgcaatcctcactctgttttagagctagaaatagcaagttaaaataaggctagtccgttatcaacttgaaaaagtggcaccgagtcggtgctgcactcacactgaccagagtgaggattgcagaattttt

SEQ ID NO: 6506 - RNA, 135 nt, synthetic construct
  source 1..135: mol_type = other RNA; note = pegRNA
aattctgcaatcctcactctgttttagagctagaaatagcaagttaaaataaggctagtccgttatcaacttgaaaaagtggcaccgagtcggtgctgcactcacactggccagagtgaggattgcagaattttt

SEQ ID NO: 6507 - RNA, 135 nt, synthetic construct
  source 1..135: mol_type = other RNA; note = pegRNA
aattctgcaatcctcactctgttttagagctagaaatagcaagttaaaataaggctagtccgttatcaacttgaaaaagtggcaccgagtcggtgctggcttcttttttgcactcacactgaccagagtgaggat

SEQ ID NO: 6508 - RNA, 135 nt, synthetic construct
  source 1..135: mol_type = other RNA; note = pegRNA
aattctgcaatcctcactctgttttagagctagaaatagcaagttaaaataaggctagtccgttatcaacttgaaaaagtggcaccgagtcggtgctggcttcttttttgcactcacactggccagagtgaggat

SEQ ID NO: 6509 - RNA, 135 nt, synthetic construct
  source 1..135: mol_type = other RNA; note = pegRNA
aattctgcaatcctcactctgttttagagctagaaatagcaagttaaaataaggctagtccgttatcaacttgaaaaagtggcaccgagtcggtgcttcttttttgcactcacactgaccagagtgaggattgca

SEQ ID NO: 6510 - RNA, 135 nt, synthetic construct
  source 1..135: mol_type = other RNA; note = pegRNA
aattctgcaatcctcactctgttttagagctagaaatagcaagttaaaataaggctagtccgttatcaacttgaaaaagtggcaccgagtcggtgcttcttttttgcactcacactgaccagagtgaggattttt

SEQ ID NO: 6511 - RNA, 135 nt, synthetic construct
  source 1..135: mol_type = other RNA; note = pegRNA
aattctgcaatcctcactctgttttagagctagaaatagcaagttaaaataaggctagtccgttatcaacttgaaaaagtggcaccgagtcggtgcttcttttttgcactcacactggccagagtgaggattgca

SEQ ID NO: 6512 - RNA, 135 nt, synthetic construct
  source 1..135: mol_type = other RNA; note = pegRNA
aattctgcaatcctcactctgttttagagctagaaatagcaagttaaaataaggctagtccgttatcaacttgaaaaagtggcaccgagtcggtgcttcttttttgcactcacactggccagagtgaggattttt

SEQ ID NO: 6513 - RNA, 135 nt, synthetic construct
  source 1..135: mol_type = other RNA; note = pegRNA
aattctgcaatcctcactctgttttagagctagaaatagcaagttaaaataaggctagtccgttatcaacttgaaaaagtggcaccgagtcggtgcttgcactcacactgaccagagtgaggattgcagaatttt

SEQ ID NO: 6514 - RNA, 135 nt, synthetic construct
  source 1..135: mol_type = other RNA; note = pegRNA
aattctgcaatcctcactctgttttagagctagaaatagcaagttaaaataaggctagtccgttatcaacttgaaaaagtggcaccgagtcggtgcttgcactcacactggccagagtgaggattgcagaatttt

SEQ ID NO: 6515 - RNA, 135 nt, synthetic construct
  source 1..135: mol_type = other RNA; note = pegRNA
aattctgcaatcctcactctgttttagagctagaaatagcaagttaaaataaggctagtccgttatcaacttgaaaaagtggcaccgagtcggtgctttgcactcacactgaccagagtgaggattgcagatttt

SEQ ID NO: 6516 - RNA, 135 nt, synthetic construct
  source 1..135: mol_type = other RNA; note = pegRNA
aattctgcaatcctcactctgttttagagctagaaatagcaagttaaaataaggctagtccgttatcaacttgaaaaagtggcaccgagtcggtgctttgcactcacactgcccagagtgaggattgcagatttt

SEQ ID NO: 6517 - RNA, 135 nt, synthetic construct
  source 1..135: mol_type = other RNA; note = pegRNA
aattctgcaatcctcactctgttttagagctagaaatagcaagttaaaataaggctagtccgttatcaacttgaaaaagtggcaccgagtcggtgctttgcactcacactggccagagtgaggattgcagatttt

SEQ ID NO: 6518 - RNA, 135 nt, synthetic construct
  source 1..135: mol_type = other RNA; note = pegRNA
aattctgcaatcctcactctgttttagagctagaaatagcaagttaaaataaggctagtccgttatcaacttgaaaaagtggcaccgagtcggtgcttttgcactcacactgaccagagtgaggattgcagtttt

SEQ ID NO: 6519 - RNA, 135 nt, synthetic construct
  source 1..135: mol_type = other RNA; note = pegRNA
aattctgcaatcctcactctgttttagagctagaaatagcaagttaaaataaggctagtccgttatcaacttgaaaaagtggcaccgagtcggtgcttttgcactcacactggccagagtgaggattgcagtttt

SEQ ID NO: 6520 - RNA, 135 nt, synthetic construct
  source 1..135: mol_type = other RNA; note = pegRNA
aattctgcaatcctcactctgttttagagctagaaatagcaagttaaaataaggctagtccgttatcaacttgaaaaagtggcaccgagtcggtgctttttgcactcacactgaccagagtgaggattgcagaat

SEQ ID NO: 6521 - RNA, 135 nt, synthetic construct
  source 1..135: mol_type = other RNA; note = pegRNA
aattctgcaatcctcactctgttttagagctagaaatagcaagttaaaataaggctagtccgttatcaacttgaaaaagtggcaccgagtcggtgctttttgcactcacactgaccagagtgaggattgcatttt

SEQ ID NO: 6522 - RNA, 135 nt, synthetic construct
  source 1..135: mol_type = other RNA; note = pegRNA
aattctgcaatcctcactctgttttagagctagaaatagcaagttaaaataaggctagtccgttatcaacttgaaaaagtggcaccgagtcggtgctttttgcactcacactggccagagtgaggattgcagaat

SEQ ID NO: 6523 - RNA, 135 nt, synthetic construct
  source 1..135: mol_type = other RNA; note = pegRNA
aattctgcaatcctcactctgttttagagctagaaatagcaagttaaaataaggctagtccgttatcaacttgaaaaagtggcaccgagtcggtgctttttgcactcacactggccagagtgaggattgcatttt

SEQ ID NO: 6524 - RNA, 135 nt, synthetic construct
  source 1..135: mol_type = other RNA; note = pegRNA
aattctgcaatcctcactctgttttagagctagaaatagcaagttaaaataaggctagtccgttatcaacttgaaaaagtggcaccgagtcggtgcttttttgcactcacactgaccagagtgaggattgcagaa

SEQ ID NO: 6525 - RNA, 135 nt, synthetic construct
  source 1..135: mol_type = other RNA; note = pegRNA
aattctgcaatcctcactctgttttagagctagaaatagcaagttaaaataaggctagtccgttatcaacttgaaaaagtggcaccgagtcggtgcttttttgcactcacactgaccagagtgaggattgctttt

SEQ ID NO: 6526 - RNA, 135 nt, synthetic construct
  source 1..135: mol_type = other RNA; note = pegRNA
aattctgcaatcctcactctgttttagagctagaaatagcaagttaaaataaggctagtccgttatcaacttgaaaaagtggcaccgagtcggtgcttttttgcactcacactggccagagtgaggattgcagaa

SEQ ID NO: 6527 - RNA, 135 nt, synthetic construct
  source 1..135: mol_type = other RNA; note = pegRNA
aattctgcaatcctcactctgttttagagctagaaatagcaagttaaaataaggctagtccgttatcaacttgaaaaagtggcaccgagtcggtgcttttttgcactcacactggccagagtgaggattgctttt

SEQ ID NO: 6528 - RNA, 135 nt, synthetic construct
  source 1..135: mol_type = other RNA; note = pegRNA
aattctgcaatcctcactctgttttagagctagaaatagcaagttaaaataaggctagtccgttatcaacttgaaaaagtggcaccgagtcggtgcttttgcactcacactgcccagagtgaggattgcagtttt

SEQ ID NO: 6529 - RNA, 136 nt, synthetic construct
  source 1..136: mol_type = other RNA; note = pegRNA
aattctgcaatcctcactctgttttagagctagaaatagcaagttaaaataaggctagtccgttatcaacttgaaaaagtggcaccgagtcggtgccttcttttttgcactcacactgaccagagtgaggattgca

SEQ ID NO: 6530 - RNA, 136 nt, synthetic construct
  source 1..136: mol_type = other RNA; note = pegRNA
aattctgcaatcctcactctgttttagagctagaaatagcaagttaaaataaggctagtccgttatcaacttgaaaaagtggcaccgagtcggtgccttcttttttgcactcacactgaccagagtgaggattttt

SEQ ID NO: 6531 - RNA, 136 nt, synthetic construct
  source 1..136: mol_type = other RNA; note = pegRNA
aattctgcaatcctcactctgttttagagctagaaatagcaagttaaaataaggctagtccgttatcaacttgaaaaagtggcaccgagtcggtgccttcttttttgcactcacactggccagagtgaggattgca

SEQ ID NO: 6532 - RNA, 136 nt, synthetic construct
  source 1..136: mol_type = other RNA; note = pegRNA
aattctgcaatcctcactctgttttagagctagaaatagcaagttaaaataaggctagtccgttatcaacttgaaaaagtggcaccgagtcggtgccttcttttttgcactcacactggccagagtgaggattttt

SEQ ID NO: 6533 - RNA, 136 nt, synthetic construct
  source 1..136: mol_type = other RNA; note = pegRNA
aattctgcaatcctcactctgttttagagctagaaatagcaagttaaaataaggctagtccgttatcaacttgaaaaagtggcaccgagtcggtgccttttttgcactcacactgaccagagtgaggattgcagaa

SEQ ID NO: 6534 - RNA, 136 nt, synthetic construct
  source 1..136: mol_type = other RNA; note = pegRNA
aattctgcaatcctcactctgttttagagctagaaatagcaagttaaaataaggctagtccgttatcaacttgaaaaagtggcaccgagtcggtgccttttttgcactcacactgaccagagtgaggattgctttt

SEQ ID NO: 6535 - RNA, 136 nt, synthetic construct
  source 1..136: mol_type = other RNA; note = pegRNA
aattctgcaatcctcactctgttttagagctagaaatagcaagttaaaataaggctagtccgttatcaacttgaaaaagtggcaccgagtcggtgccttttttgcactcacactggccagagtgaggattgcagaa

SEQ ID NO: 6536 - RNA, 136 nt, synthetic construct
  source 1..136: mol_type = other RNA; note = pegRNA
aattctgcaatcctcactctgttttagagctagaaatagcaagttaaaataaggctagtccgttatcaacttgaaaaagtggcaccgagtcggtgccttttttgcactcacactggccagagtgaggattgctttt

SEQ ID NO: 6537 - RNA, 136 nt, synthetic construct
  source 1..136: mol_type = other RNA; note = pegRNA
aattctgcaatcctcactctgttttagagctagaaatagcaagttaaaataaggctagtccgttatcaacttgaaaaagtggcaccgagtcggtgcgcttcttttttgcactcacactgaccagagtgaggattgc

SEQ ID NO: 6538 - RNA, 136 nt, synthetic construct
  source 1..136: mol_type = other RNA; note = pegRNA
aattctgcaatcctcactctgttttagagctagaaatagcaagttaaaataaggctagtccgttatcaacttgaaaaagtggcaccgagtcggtgcgcttcttttttgcactcacactggccagagtgaggattgc

SEQ ID NO: 6539 - RNA, 136 nt, synthetic construct
  source 1..136: mol_type = other RNA; note = pegRNA
aattctgcaatcctcactctgttttagagctagaaatagcaagttaaaataaggctagtccgttatcaacttgaaaaagtggcaccgagtcggtgcggcttcttttttgcactcacactgaccagagtgaggattg

SEQ ID NO: 6540 - RNA, 136 nt, synthetic construct
  source 1..136: mol_type = other RNA; note = pegRNA
aattctgcaatcctcactctgttttagagctagaaatagcaagttaaaataaggctagtccgttatcaacttgaaaaagtggcaccgagtcggtgcggcttcttttttgcactcacactggccagagtgaggattg

SEQ ID NO: 6541 - RNA, 136 nt, synthetic construct
  source 1..136: mol_type = other RNA; note = pegRNA
aattctgcaatcctcactctgttttagagctagaaatagcaagttaaaataaggctagtccgttatcaacttgaaaaagtggcaccgagtcggtgctcttttttgcactcacactgaccagagtgaggattgcaga

SEQ ID NO: 6542 - RNA, 136 nt, synthetic construct
  source 1..136: mol_type = other RNA; note = pegRNA
aattctgcaatcctcactctgttttagagctagaaatagcaagttaaaataaggctagtccgttatcaacttgaaaaagtggcaccgagtcggtgctcttttttgcactcacactgaccagagtgaggattgtttt

SEQ ID NO: 6543 - RNA, 136 nt, synthetic construct
  source 1..136: mol_type = other RNA; note = pegRNA
aattctgcaatcctcactctgttttagagctagaaatagcaagttaaaataaggctagtccgttatcaacttgaaaaagtggcaccgagtcggtgctcttttttgcactcacactggccagagtgaggattgcaga

SEQ ID NO: 6544 - RNA, 136 nt, synthetic construct
  source 1..136: mol_type = other RNA; note = pegRNA
aattctgcaatcctcactctgttttagagctagaaatagcaagttaaaataaggctagtccgttatcaacttgaaaaagtggcaccgagtcggtgctcttttttgcactcacactggccagagtgaggattgtttt

SEQ ID NO: 6545 - RNA, 136 nt, synthetic construct
  source 1..136: mol_type = other RNA; note = pegRNA
aattctgcaatcctcactctgttttagagctagaaatagcaagttaaaataaggctagtccgttatcaacttgaaaaagtggcaccgagtcggtgctggcttcttttttgcactcacactgaccagagtgaggatt

SEQ ID NO: 6546 - RNA, 136 nt, synthetic construct
  source 1..136: mol_type = other RNA; note = pegRNA
aattctgcaatcctcactctgttttagagctagaaatagcaagttaaaataaggctagtccgttatcaacttgaaaaagtggcaccgagtcggtgctggcttcttttttgcactcacactggccagagtgaggatt

SEQ ID NO: 6547 - RNA, 136 nt, synthetic construct
  source 1..136: mol_type = other RNA; note = pegRNA
aattctgcaatcctcactctgttttagagctagaaatagcaagttaaaataaggctagtccgttatcaacttgaaaaagtggcaccgagtcggtgcttcttttttgcactcacactgaccagagtgaggattgcag

SEQ ID NO: 6548 - RNA, 136 nt, synthetic construct
  source 1..136: mol_type = other RNA; note = pegRNA
aattctgcaatcctcactctgttttagagctagaaatagcaagttaaaataaggctagtccgttatcaacttgaaaaagtggcaccgagtcggtgcttcttttttgcactcacactgaccagagtgaggatttttt

SEQ ID NO: 6549 - RNA, 136 nt, synthetic construct
  source 1..136: mol_type = other RNA; note = pegRNA
aattctgcaatcctcactctgttttagagctagaaatagcaagttaaaataaggctagtccgttatcaacttgaaaaagtggcaccgagtcggtgcttcttttttgcactcacactggccagagtgaggattgcag

SEQ ID NO: 6550 - RNA, 136 nt, synthetic construct
  source 1..136: mol_type = other RNA; note = pegRNA
aattctgcaatcctcactctgttttagagctagaaatagcaagttaaaataaggctagtccgttatcaacttgaaaaagtggcaccgagtcggtgcttcttttttgcactcacactggccagagtgaggatttttt

SEQ ID NO: 6551 - RNA, 136 nt, synthetic construct
  source 1..136: mol_type = other RNA; note = pegRNA
aattctgcaatcctcactctgttttagagctagaaatagcaagttaaaataaggctagtccgttatcaacttgaaaaagtggcaccgagtcggtgcttgcactcacactgaccagagtgaggattgcagaattttt

SEQ ID NO: 6552 - RNA, 136 nt, synthetic construct
  source 1..136: mol_type = other RNA; note = pegRNA
aattctgcaatcctcactctgttttagagctagaaatagcaagttaaaataaggctagtccgttatcaacttgaaaaagtggcaccgagtcggtgcttgcactcacactggccagagtgaggattgcagaattttt

SEQ ID NO: 6553 - RNA, 136 nt, synthetic construct
  source 1..136: mol_type = other RNA; note = pegRNA
aattctgcaatcctcactctgttttagagctagaaatagcaagttaaaataaggctagtccgttatcaacttgaaaaagtggcaccgagtcggtgcttggcttcttttttgcactcacactgaccagagtgaggat

SEQ ID NO: 6554 - RNA, 136 nt, synthetic construct
  source 1..136: mol_type = other RNA; note = pegRNA
aattctgcaatcctcactctgttttagagctagaaatagcaagttaaaataaggctagtccgttatcaacttgaaaaagtggcaccgagtcggtgcttggcttcttttttgcactcacactggccagagtgaggat

SEQ ID NO: 6555 - RNA, 136 nt, synthetic construct
  source 1..136: mol_type = other RNA; note = pegRNA
aattctgcaatcctcactctgttttagagctagaaatagcaagttaaaataaggctagtccgttatcaacttgaaaaagtggcaccgagtcggtgctttgcactcacactgaccagagtgaggattgcagaatttt

SEQ ID NO: 6556 - RNA, 136 nt, synthetic construct
  source 1..136: mol_type = other RNA; note = pegRNA
aattctgcaatcctcactctgttttagagctagaaatagcaagttaaaataaggctagtccgttatcaacttgaaaaagtggcaccgagtcggtgctttgcactcacactggccagagtgaggattgcagaatttt

SEQ ID NO: 6557 - RNA, 136 nt, synthetic construct
  source 1..136: mol_type = other RNA; note = pegRNA
aattctgcaatcctcactctgttttagagctagaaatagcaagttaaaataaggctagtccgttatcaacttgaaaaagtggcaccgagtcggtgcttttgcactcacactgaccagagtgaggattgcagatttt

SEQ ID NO: 6558 - RNA, 136 nt, synthetic construct
  source 1..136: mol_type = other RNA; note = pegRNA
aattctgcaatcctcactctgttttagagctagaaatagcaagttaaaataaggctagtccgttatcaacttgaaaaagtggcaccgagtcggtgcttttgcactcacactggccagagtgaggattgcagatttt

SEQ ID NO: 6559 - RNA, 136 nt, synthetic construct
  source 1..136: mol_type = other RNA; note = pegRNA
aattctgcaatcctcactctgttttagagctagaaatagcaagttaaaataaggctagtccgttatcaacttgaaaaagtggcaccgagtcggtgctttttgcactcacactgaccagagtgaggattgcagtttt

SEQ ID NO: 6560 - RNA, 136 nt, synthetic construct
  source 1..136: mol_type = other RNA; note = pegRNA
aattctgcaatcctcactctgttttagagctagaaatagcaagttaaaataaggctagtccgttatcaacttgaaaaagtggcaccgagtcggtgctttttgcactcacactggccagagtgaggattgcagtttt

SEQ ID NO: 6561 - RNA, 136 nt, synthetic construct
  source 1..136: mol_type = other RNA; note = pegRNA
aattctgcaatcctcactctgttttagagctagaaatagcaagttaaaataaggctagtccgttatcaacttgaaaaagtggcaccgagtcggtgcttttttgcactcacactgaccagagtgaggattgcagaat

SEQ ID NO: 6562 - RNA, 136 nt, synthetic construct
  source 1..136: mol_type = other RNA; note = pegRNA
aattctgcaatcctcactctgttttagagctagaaatagcaagttaaaataaggctagtccgttatcaacttgaaaaagtggcaccgagtcggtgcttttttgcactcacactgaccagagtgaggattgcatttt

SEQ ID NO: 6563 - RNA, 136 nt, synthetic construct
  source 1..136: mol_type = other RNA; note = pegRNA
aattctgcaatcctcactctgttttagagctagaaatagcaagttaaaataaggctagtccgttatcaacttgaaaaagtggcaccgagtcggtgcttttttgcactcacactggccagagtgaggattgcagaat

SEQ ID NO: 6564 - RNA, 136 nt, synthetic construct
  source 1..136: mol_type = other RNA; note = pegRNA
aattctgcaatcctcactctgttttagagctagaaatagcaagttaaaataaggctagtccgttatcaacttgaaaaagtggcaccgagtcggtgcttttttgcactcacactggccagagtgaggattgcatttt

SEQ ID NO: 6565 - RNA, 137 nt, synthetic construct
  source 1..137: mol_type = other RNA; note = pegRNA
aattctgcaatcctcactctgttttagagctagaaatagcaagttaaaataaggctagtccgttatcaacttgaaaaagtggcaccgagtcggtgccttcttttttgcactcacactgaccagagtgaggattgcag

SEQ ID NO: 6566 - RNA, 137 nt, synthetic construct
  source 1..137: mol_type = other RNA; note = pegRNA
aattctgcaatcctcactctgttttagagctagaaatagcaagttaaaataaggctagtccgttatcaacttgaaaaagtggcaccgagtcggtgccttcttttttgcactcacactgaccagagtgaggatttttt

SEQ ID NO: 6567 - RNA, 137 nt, synthetic construct
  source 1..137: mol_type = other RNA; note = pegRNA
aattctgcaatcctcactctgttttagagctagaaatagcaagttaaaataaggctagtccgttatcaacttgaaaaagtggcaccgagtcggtgccttcttttttgcactcacactggccagagtgaggattgcag

SEQ ID NO: 6568 - RNA, 137 nt, synthetic construct
  source 1..137: mol_type = other RNA; note = pegRNA
aattctgcaatcctcactctgttttagagctagaaatagcaagttaaaataaggctagtccgttatcaacttgaaaaagtggcaccgagtcggtgccttcttttttgcactcacactggccagagtgaggatttttt

SEQ ID NO: 6569 - RNA, 137 nt, synthetic construct
  source 1..137: mol_type = other RNA; note = pegRNA
aattctgcaatcctcactctgttttagagctagaaatagcaagttaaaataaggctagtccgttatcaacttgaaaaagtggcaccgagtcggtgccttttttgcactcacactgaccagagtgaggattgcagaat

SEQ ID NO: 6570 - RNA, 137 nt, synthetic construct
  source 1..137: mol_type = other RNA; note = pegRNA
aattctgcaatcctcactctgttttagagctagaaatagcaagttaaaataaggctagtccgttatcaacttgaaaaagtggcaccgagtcggtgccttttttgcactcacactgaccagagtgaggattgcatttt

SEQ ID NO: 6571 - RNA, 137 nt, synthetic construct
  source 1..137: mol_type = other RNA; note = pegRNA
aattctgcaatcctcactctgttttagagctagaaatagcaagttaaaataaggctagtccgttatcaacttgaaaaagtggcaccgagtcggtgccttttttgcactcacactggccagagtgaggattgcagaat

SEQ ID NO: 6572 - RNA, 137 nt, synthetic construct
  source 1..137: mol_type = other RNA; note = pegRNA
aattctgcaatcctcactctgttttagagctagaaatagcaagttaaaataaggctagtccgttatcaacttgaaaaagtggcaccgagtcggtgccttttttgcactcacactggccagagtgaggattgcatttt

SEQ ID NO: 6573 - RNA, 137 nt, synthetic construct
  source 1..137: mol_type = other RNA; note = pegRNA
aattctgcaatcctcactctgttttagagctagaaatagcaagttaaaataaggctagtccgttatcaacttgaaaaagtggcaccgagtcggtgcgcttcttttttgcactcacactgaccagagtgaggattgca

SEQ ID NO: 6574 - RNA, 137 nt, synthetic construct
  source 1..137: mol_type = other RNA; note = pegRNA
aattctgcaatcctcactctgttttagagctagaaatagcaagttaaaataaggctagtccgttatcaacttgaaaaagtggcaccgagtcggtgcgcttcttttttgcactcacactgaccagagtgaggattttt

SEQ ID NO: 6575 - RNA, 137 nt, synthetic construct
  source 1..137: mol_type = other RNA; note = pegRNA
aattctgcaatcctcactctgttttagagctagaaatagcaagttaaaataaggctagtccgttatcaacttgaaaaagtggcaccgagtcggtgcgcttcttttttgcactcacactggccagagtgaggattgca

SEQ ID NO: 6576 - RNA, 137 nt, synthetic construct
  source 1..137: mol_type = other RNA; note = pegRNA
aattctgcaatcctcactctgttttagagctagaaatagcaagttaaaataaggctagtccgttatcaacttgaaaaagtggcaccgagtcggtgcgcttcttttttgcactcacactggccagagtgaggattttt

SEQ ID NO: 6577 - RNA, 137 nt, synthetic construct
  source 1..137: mol_type = other RNA; note = pegRNA
aattctgcaatcctcactctgttttagagctagaaatagcaagttaaaataaggctagtccgttatcaacttgaaaaagtggcaccgagtcggtgcggcttcttttttgcactcacactgaccagagtgaggattgc

SEQ ID NO: 6578 - RNA, 137 nt, synthetic construct
  source 1..137: mol_type = other RNA; note = pegRNA
aattctgcaatcctcactctgttttagagctagaaatagcaagttaaaataaggctagtccgttatcaacttgaaaaagtggcaccgagtcggtgcggcttcttttttgcactcacactggccagagtgaggattgc

SEQ ID NO: 6579 - RNA, 137 nt, synthetic construct
  source 1..137: mol_type = other RNA; note = pegRNA
aattctgcaatcctcactctgttttagagctagaaatagcaagttaaaataaggctagtccgttatcaacttgaaaaagtggcaccgagtcggtgctcttttttgcactcacactgaccagagtgaggattgcagaa

SEQ ID NO: 6580 - RNA, 137 nt, synthetic construct
  source 1..137: mol_type = other RNA; note = pegRNA
aattctgcaatcctcactctgttttagagctagaaatagcaagttaaaataaggctagtccgttatcaacttgaaaaagtggcaccgagtcggtgctcttttttgcactcacactgaccagagtgaggattgctttt

SEQ ID NO: 6581 - RNA, 137 nt, synthetic construct
  source 1..137: mol_type = other RNA; note = pegRNA
aattctgcaatcctcactctgttttagagctagaaatagcaagttaaaataaggctagtccgttatcaacttgaaaaagtggcaccgagtcggtgctcttttttgcactcacactggccagagtgaggattgcagaa

SEQ ID NO: 6582 - RNA, 137 nt, synthetic construct
  source 1..137: mol_type = other RNA; note = pegRNA
aattctgcaatcctcactctgttttagagctagaaatagcaagttaaaataaggctagtccgttatcaacttgaaaaagtggcaccgagtcggtgctcttttttgcactcacactggccagagtgaggattgctttt

SEQ ID NO: 6583 - RNA, 137 nt, synthetic construct
  source 1..137: mol_type = other RNA; note = pegRNA
aattctgcaatcctcactctgttttagagctagaaatagcaagttaaaataaggctagtccgttatcaacttgaaaaagtggcaccgagtcggtgctggcttcttttttgcactcacactgaccagagtgaggattg

SEQ ID NO: 6584 - RNA, 137 nt, synthetic construct
  source 1..137: mol_type = other RNA; note = pegRNA
aattctgcaatcctcactctgttttagagctagaaatagcaagttaaaataaggctagtccgttatcaacttgaaaaagtggcaccgagtcggtgctggcttcttttttgcactcacactggccagagtgaggattg

SEQ ID NO: 6585 - RNA, 137 nt, synthetic construct
  source 1..137: mol_type = other RNA; note = pegRNA
aattctgcaatcctcactctgttttagagctagaaatagcaagttaaaataaggctagtccgttatcaacttgaaaaagtggcaccgagtcggtgcttcttttttgcactcacactgaccagagtgaggattgcaga

SEQ ID NO: 6586 - RNA, 137 nt, synthetic construct
  source 1..137: mol_type = other RNA; note = pegRNA
aattctgcaatcctcactctgttttagagctagaaatagcaagttaaaataaggctagtccgttatcaacttgaaaaagtggcaccgagtcggtgcttcttttttgcactcacactgaccagagtgaggattgtttt

SEQ ID NO: 6587 - RNA, 137 nt, synthetic construct
  source 1..137: mol_type = other RNA; note = pegRNA
aattctgcaatcctcactctgttttagagctagaaatagcaagttaaaataaggctagtccgttatcaacttgaaaaagtggcaccgagtcggtgcttcttttttgcactcacactggccagagtgaggattgcaga

SEQ ID NO: 6588 - RNA, 137 nt, synthetic construct
  source 1..137: mol_type = other RNA; note = pegRNA
aattctgcaatcctcactctgttttagagctagaaatagcaagttaaaataaggctagtccgttatcaacttgaaaaagtggcaccgagtcggtgcttcttttttgcactcacactggccagagtgaggattgtttt

SEQ ID NO: 6589 - RNA, 137 nt, synthetic construct
  source 1..137: mol_type = other RNA; note = pegRNA
aattctgcaatcctcactctgttttagagctagaaatagcaagttaaaataaggctagtccgttatcaacttgaaaaagtggcaccgagtcggtgcttggcttcttttttgcactcacactgaccagagtgaggatt

SEQ ID NO: 6590 - RNA, 137 nt, synthetic construct
  source 1..137: mol_type = other RNA; note = pegRNA
aattctgcaatcctcactctgttttagagctagaaatagcaagttaaaataaggctagtccgttatcaacttgaaaaagtggcaccgagtcggtgcttggcttcttttttgcactcacactggccagagtgaggatt

SEQ ID NO: 6591 - RNA, 137 nt, synthetic construct
  source 1..137: mol_type = other RNA; note = pegRNA
aattctgcaatcctcactctgttttagagctagaaatagcaagttaaaataaggctagtccgttatcaacttgaaaaagtggcaccgagtcggtgctttgcactcacactgaccagagtgaggattgcagaattttt

SEQ ID NO: 6592 - RNA, 137 nt, synthetic construct
  source 1..137: mol_type = other RNA; note = pegRNA
aattctgcaatcctcactctgttttagagctagaaatagcaagttaaaataaggctagtccgttatcaacttgaaaaagtggcaccgagtcggtgctttgcactcacactggccagagtgaggattgcagaattttt

SEQ ID NO: 6593 - RNA, 137 nt, synthetic construct
  source 1..137: mol_type = other RNA; note = pegRNA
aattctgcaatcctcactctgttttagagctagaaatagcaagttaaaataaggctagtccgttatcaacttgaaaaagtggcaccgagtcggtgctttggcttcttttttgcactcacactgaccagagtgaggat

SEQ ID NO: 6594 - RNA, 137 nt, synthetic construct
  source 1..137: mol_type = other RNA; note = pegRNA
aattctgcaatcctcactctgttttagagctagaaatagcaagttaaaataaggctagtccgttatcaacttgaaaaagtggcaccgagtcggtgctttggcttcttttttgcactcacactggccagagtgaggat

SEQ ID NO: 6595 - RNA, 137 nt, synthetic construct
  source 1..137: mol_type = other RNA; note = pegRNA
aattctgcaatcctcactctgttttagagctagaaatagcaagttaaaataaggctagtccgttatcaacttgaaaaagtggcaccgagtcggtgcttttgcactcacactgaccagagtgaggattgcagaatttt

SEQ ID NO: 6596 - RNA, 137 nt, synthetic construct
  source 1..137: mol_type = other RNA; note = pegRNA
aattctgcaatcctcactctgttttagagctagaaatagcaagttaaaataaggctagtccgttatcaacttgaaaaagtggcaccgagtcggtgcttttgcactcacactggccagagtgaggattgcagaatttt

SEQ ID NO: 6597 - RNA, 137 nt, synthetic construct
  source 1..137: mol_type = other RNA; note = pegRNA
aattctgcaatcctcactctgttttagagctagaaatagcaagttaaaataaggctagtccgttatcaacttgaaaaagtggcaccgagtcggtgctttttgcactcacactgaccagagtgaggattgcagatttt

SEQ ID NO: 6598 - RNA, 137 nt, synthetic construct
  source 1..137: mol_type = other RNA; note = pegRNA
aattctgcaatcctcactctgttttagagctagaaatagcaagttaaaataaggctagtccgttatcaacttgaaaaagtggcaccgagtcggtgctttttgcactcacactggccagagtgaggattgcagatttt

SEQ ID NO: 6599 - RNA, 137 nt, synthetic construct
  source 1..137: mol_type = other RNA; note = pegRNA
aattctgcaatcctcactctgttttagagctagaaatagcaagttaaaataaggctagtccgttatcaacttgaaaaagtggcaccgagtcggtgcttttttgcactcacactgaccagagtgaggattgcagtttt

SEQ ID NO: 6600 - RNA, 137 nt, synthetic construct
  source 1..137: mol_type = other RNA; note = pegRNA
aattctgcaatcctcactctgttttagagctagaaatagcaagttaaaataaggctagtccgttatcaacttgaaaaagtggcaccgagtcggtgcttttttgcactcacactggccagagtgaggattgcagtttt

SEQ ID NO: 6601 - RNA, 138 nt, synthetic construct
  source 1..138: mol_type = other RNA; note = pegRNA
aattctgcaatcctcactctgttttagagctagaaatagcaagttaaaataaggctagtccgttatcaacttgaaaaagtggcaccgagtcggtgccttcttttttgcactcacactgaccagagtgaggattgcaga

SEQ ID NO: 6602 - RNA, 138 nt, synthetic construct
  source 1..138: mol_type = other RNA; note = pegRNA
aattctgcaatcctcactctgttttagagctagaaatagcaagttaaaataaggctagtccgttatcaacttgaaaaagtggcaccgagtcggtgccttcttttttgcactcacactgaccagagtgaggattgtttt

SEQ ID NO: 6603 - RNA, 138 nt, synthetic construct
  source 1..138: mol_type = other RNA; note = pegRNA
aattctgcaatcctcactctgttttagagctagaaatagcaagttaaaataaggctagtccgttatcaacttgaaaaagtggcaccgagtcggtgccttcttttttgcactcacactggccagagtgaggattgcaga

SEQ ID NO: 6604 - RNA, 138 nt, synthetic construct
  source 1..138: mol_type = other RNA; note = pegRNA
aattctgcaatcctcactctgttttagagctagaaatagcaagttaaaataaggctagtccgttatcaacttgaaaaagtggcaccgagtcggtgccttcttttttgcactcacactggccagagtgaggattgtttt

SEQ ID NO: 6605 - RNA, 138 nt, synthetic construct
  source 1..138: mol_type = other RNA; note = pegRNA
aattctgcaatcctcactctgttttagagctagaaatagcaagttaaaataaggctagtccgttatcaacttgaaaaagtggcaccgagtcggtgcctttggcttcttttttgcactcacactgaccagagtgaggat

SEQ ID NO: 6606 - RNA, 138 nt, synthetic construct
  source 1..138: mol_type = other RNA; note = pegRNA
aattctgcaatcctcactctgttttagagctagaaatagcaagttaaaataaggctagtccgttatcaacttgaaaaagtggcaccgagtcggtgcctttggcttcttttttgcactcacactggccagagtgaggat

SEQ ID NO: 6607 - RNA, 138 nt, synthetic construct
  source 1..138: mol_type = other RNA; note = pegRNA
aattctgcaatcctcactctgttttagagctagaaatagcaagttaaaataaggctagtccgttatcaacttgaaaaagtggcaccgagtcggtgccttttttgcactcacactgaccagagtgaggattgcagtttt

SEQ ID NO: 6608 - RNA, 138 nt, synthetic construct
  source 1..138: mol_type = other RNA; note = pegRNA
aattctgcaatcctcactctgttttagagctagaaatagcaagttaaaataaggctagtccgttatcaacttgaaaaagtggcaccgagtcggtgccttttttgcactcacactggccagagtgaggattgcagtttt

SEQ ID NO: 6609 - RNA, 138 nt, synthetic construct
  source 1..138: mol_type = other RNA; note = pegRNA
aattctgcaatcctcactctgttttagagctagaaatagcaagttaaaataaggctagtccgttatcaacttgaaaaagtggcaccgagtcggtgcgcttcttttttgcactcacactgaccagagtgaggattgcag

SEQ ID NO: 6610 - RNA, 138 nt, synthetic construct
  source 1..138: mol_type = other RNA; note = pegRNA
aattctgcaatcctcactctgttttagagctagaaatagcaagttaaaataaggctagtccgttatcaacttgaaaaagtggcaccgagtcggtgcgcttcttttttgcactcacactgaccagagtgaggatttttt

SEQ ID NO: 6611 - RNA, 138 nt, synthetic construct
  source 1..138: mol_type = other RNA; note = pegRNA
aattctgcaatcctcactctgttttagagctagaaatagcaagttaaaataaggctagtccgttatcaacttgaaaaagtggcaccgagtcggtgcgcttcttttttgcactcacactggccagagtgaggattgcag

SEQ ID NO: 6612 - RNA, 138 nt, synthetic construct
  source 1..138: mol_type = other RNA; note = pegRNA
aattctgcaatcctcactctgttttagagctagaaatagcaagttaaaataaggctagtccgttatcaacttgaaaaagtggcaccgagtcggtgcgcttcttttttgcactcacactggccagagtgaggatttttt

SEQ ID NO: 6613 - RNA, 138 nt, synthetic construct
  source 1..138: mol_type = other RNA; note = pegRNA
aattctgcaatcctcactctgttttagagctagaaatagcaagttaaaataaggctagtccgttatcaacttgaaaaagtggcaccgagtcggtgcggcttcttttttgcactcacactgaccagagtgaggattgca

SEQ ID NO: 6614 - RNA, 138 nt, synthetic construct
  source 1..138: mol_type = other RNA; note = pegRNA
aattctgcaatcctcactctgttttagagctagaaatagcaagttaaaataaggctagtccgttatcaacttgaaaaagtggcaccgagtcggtgcggcttcttttttgcactcacactgaccagagtgaggattttt

SEQ ID NO: 6615 - RNA, 138 nt, synthetic construct
  source 1..138: mol_type = other RNA; note = pegRNA
aattctgcaatcctcactctgttttagagctagaaatagcaagttaaaataaggctagtccgttatcaacttgaaaaagtggcaccgagtcggtgcggcttcttttttgcactcacactggccagagtgaggattgca

SEQ ID NO: 6616 - RNA, 138 nt, synthetic construct
  source 1..138: mol_type = other RNA; note = pegRNA
aattctgcaatcctcactctgttttagagctagaaatagcaagttaaaataaggctagtccgttatcaacttgaaaaagtggcaccgagtcggtgcggcttcttttttgcactcacactggccagagtgaggattttt

SEQ ID NO: 6617 - RNA, 138 nt, synthetic construct
  source 1..138: mol_type = other RNA; note = pegRNA
aattctgcaatcctcactctgttttagagctagaaatagcaagttaaaataaggctagtccgttatcaacttgaaaaagtggcaccgagtcggtgctcttttttgcactcacactgaccagagtgaggattgcagaat

SEQ ID NO: 6618 - RNA, 138 nt, synthetic construct
  source 1..138: mol_type = other RNA; note = pegRNA
aattctgcaatcctcactctgttttagagctagaaatagcaagttaaaataaggctagtccgttatcaacttgaaaaagtggcaccgagtcggtgctcttttttgcactcacactgaccagagtgaggattgcatttt

SEQ ID NO: 6619 - RNA, 138 nt, synthetic construct
  source 1..138: mol_type = other RNA; note = pegRNA
aattctgcaatcctcactctgttttagagctagaaatagcaagttaaaataaggctagtccgttatcaacttgaaaaagtggcaccgagtcggtgctcttttttgcactcacactggccagagtgaggattgcagaat

SEQ ID NO: 6620 - RNA, 138 nt, synthetic construct
  source 1..138: mol_type = other RNA; note = pegRNA
aattctgcaatcctcactctgttttagagctagaaatagcaagttaaaataaggctagtccgttatcaacttgaaaaagtggcaccgagtcggtgctcttttttgcactcacactggccagagtgaggattgcatttt

SEQ ID NO: 6621 - RNA, 138 nt, synthetic construct
  source 1..138: mol_type = other RNA; note = pegRNA
aattctgcaatcctcactctgttttagagctagaaatagcaagttaaaataaggctagtccgttatcaacttgaaaaagtggcaccgagtcggtgctggcttcttttttgcactcacactgaccagagtgaggattgc

SEQ ID NO: 6622 - RNA, 138 nt, synthetic construct
  source 1..138: mol_type = other RNA; note = pegRNA
aattctgcaatcctcactctgttttagagctagaaatagcaagttaaaataaggctagtccgttatcaacttgaaaaagtggcaccgagtcggtgctggcttcttttttgcactcacactggccagagtgaggattgc

SEQ ID NO: 6623 - RNA, 138 nt, synthetic construct
  source 1..138: mol_type = other RNA; note = pegRNA
aattctgcaatcctcactctgttttagagctagaaatagcaagttaaaataaggctagtccgttatcaacttgaaaaagtggcaccgagtcggtgcttcttttttgcactcacactgaccagagtgaggattgcagaa

SEQ ID NO: 6624 - RNA, 138 nt, synthetic construct
  source 1..138: mol_type = other RNA; note = pegRNA
aattctgcaatcctcactctgttttagagctagaaatagcaagttaaaataaggctagtccgttatcaacttgaaaaagtggcaccgagtcggtgcttcttttttgcactcacactgaccagagtgaggattgctttt

SEQ ID NO: 6625 - RNA, 138 nt, synthetic construct
  source 1..138: mol_type = other RNA; note = pegRNA
aattctgcaatcctcactctgttttagagctagaaatagcaagttaaaataaggctagtccgttatcaacttgaaaaagtggcaccgagtcggtgcttcttttttgcactcacactggccagagtgaggattgcagaa

SEQ ID NO: 6626 - RNA, 138 nt, synthetic construct
  source 1..138: mol_type = other RNA; note = pegRNA
aattctgcaatcctcactctgttttagagctagaaatagcaagttaaaataaggctagtccgttatcaacttgaaaaagtggcaccgagtcggtgcttcttttttgcactcacactggccagagtgaggattgctttt

SEQ ID NO: 6627 - RNA, 138 nt, synthetic construct
  source 1..138: mol_type = other RNA; note = pegRNA
aattctgcaatcctcactctgttttagagctagaaatagcaagttaaaataaggctagtccgttatcaacttgaaaaagtggcaccgagtcggtgcttggcttcttttttgcactcacactgaccagagtgaggattg

SEQ ID NO: 6628 - RNA, 138 nt, synthetic construct
  source 1..138: mol_type = other RNA; note = pegRNA
aattctgcaatcctcactctgttttagagctagaaatagcaagttaaaataaggctagtccgttatcaacttgaaaaagtggcaccgagtcggtgcttggcttcttttttgcactcacactggccagagtgaggattg

SEQ ID NO: 6629 - RNA, 138 nt, synthetic construct
  source 1..138: mol_type = other RNA; note = pegRNA
aattctgcaatcctcactctgttttagagctagaaatagcaagttaaaataaggctagtccgttatcaacttgaaaaagtggcaccgagtcggtgctttggcttcttttttgcactcacactgaccagagtgaggatt

SEQ ID NO: 6630 - RNA, 138 nt, synthetic construct
  source 1..138: mol_type = other RNA; note = pegRNA
aattctgcaatcctcactctgttttagagctagaaatagcaagttaaaataaggctagtccgttatcaacttgaaaaagtggcaccgagtcggtgctttggcttcttttttgcactcacactggccagagtgaggatt

SEQ ID NO: 6631 - RNA, 138 nt, synthetic construct
  source 1..138: mol_type = other RNA; note = pegRNA
aattctgcaatcctcactctgttttagagctagaaatagcaagttaaaataaggctagtccgttatcaacttgaaaaagtggcaccgagtcggtgcttttgcactcacactgaccagagtgaggattgcagaattttt

SEQ ID NO: 6632 - RNA, 138 nt, synthetic construct
  source 1..138: mol_type = other RNA; note = pegRNA
aattctgcaatcctcactctgttttagagctagaaatagcaagttaaaataaggctagtccgttatcaacttgaaaaagtggcaccgagtcggtgcttttgcactcacactggccagagtgaggattgcagaattttt

SEQ ID NO: 6633 - RNA, 138 nt, synthetic construct
  source 1..138: mol_type = other RNA; note = pegRNA
aattctgcaatcctcactctgttttagagctagaaatagcaagttaaaataaggctagtccgttatcaacttgaaaaagtggcaccgagtcggtgctttttgcactcacactgaccagagtgaggattgcagaatttt

SEQ ID NO: 6634 - RNA, 138 nt, synthetic construct
  source 1..138: mol_type = other RNA; note = pegRNA
aattctgcaatcctcactctgttttagagctagaaatagcaagttaaaataaggctagtccgttatcaacttgaaaaagtggcaccgagtcggtgctttttgcactcacactggccagagtgaggattgcagaatttt

SEQ ID NO: 6635 - RNA, 138 nt, synthetic construct
  source 1..138: mol_type = other RNA; note = pegRNA
aattctgcaatcctcactctgttttagagctagaaatagcaagttaaaataaggctagtccgttatcaacttgaaaaagtggcaccgagtcggtgcttttttgcactcacactgaccagagtgaggattgcagatttt

SEQ ID NO: 6636 - RNA, 138 nt, synthetic construct
  source 1..138: mol_type = other RNA; note = pegRNA
aattctgcaatcctcactctgttttagagctagaaatagcaagttaaaataaggctagtccgttatcaacttgaaaaagtggcaccgagtcggtgcttttttgcactcacactggccagagtgaggattgcagatttt

SEQ ID NO: 6637 - RNA, 139 nt, synthetic construct
  source 1..139: mol_type = other RNA; note = pegRNA
aattctgcaatcctcactctgttttagagctagaaatagcaagttaaaataaggctagtccgttatcaacttgaaaaagtggcaccgagtcggtgccctttggcttcttttttgcactcacactgaccagagtgaggat

SEQ ID NO: 6638 - RNA, 139 nt, synthetic construct
  source 1..139: mol_type = other RNA; note = pegRNA
aattctgcaatcctcactctgttttagagctagaaatagcaagttaaaataaggctagtccgttatcaacttgaaaaagtggcaccgagtcggtgccctttggcttcttttttgcactcacactggccagagtgaggat

SEQ ID NO: 6639 - RNA, 139 nt, synthetic construct
  source 1..139: mol_type = other RNA; note = pegRNA
aattctgcaatcctcactctgttttagagctagaaatagcaagttaaaataaggctagtccgttatcaacttgaaaaagtggcaccgagtcggtgccttcttttttgcactcacactgaccagagtgaggattgcagaa

SEQ ID NO: 6640 - RNA, 139 nt, synthetic construct
  source 1..139: mol_type = other RNA; note = pegRNA
aattctgcaatcctcactctgttttagagctagaaatagcaagttaaaataaggctagtccgttatcaacttgaaaaagtggcaccgagtcggtgccttcttttttgcactcacactgaccagagtgaggattgctttt

SEQ ID NO: 6641 - RNA, 139 nt, synthetic construct
  source 1..139: mol_type = other RNA; note = pegRNA
aattctgcaatcctcactctgttttagagctagaaatagcaagttaaaataaggctagtccgttatcaacttgaaaaagtggcaccgagtcggtgccttcttttttgcactcacactggccagagtgaggattgcagaa

SEQ ID NO: 6642 - RNA, 139 nt, synthetic construct
  source 1..139: mol_type = other RNA; note = pegRNA
aattctgcaatcctcactctgttttagagctagaaatagcaagttaaaataaggctagtccgttatcaacttgaaaaagtggcaccgagtcggtgccttcttttttgcactcacactggccagagtgaggattgctttt

SEQ ID NO: 6643 - RNA, 139 nt, synthetic construct
  source 1..139: mol_type = other RNA; note = pegRNA
aattctgcaatcctcactctgttttagagctagaaatagcaagttaaaataaggctagtccgttatcaacttgaaaaagtggcaccgagtcggtgcctttggcttcttttttgcactcacactgaccagagtgaggatt

SEQ ID NO: 6644 - RNA, 139 nt, synthetic construct
  source 1..139: mol_type = other RNA; note = pegRNA
aattctgcaatcctcactctgttttagagctagaaatagcaagttaaaataaggctagtccgttatcaacttgaaaaagtggcaccgagtcggtgcctttggcttcttttttgcactcacactggccagagtgaggatt

SEQ ID NO: 6645 - RNA, 139 nt, synthetic construct
  source 1..139: mol_type = other RNA; note = pegRNA
aattctgcaatcctcactctgttttagagctagaaatagcaagttaaaataaggctagtccgttatcaacttgaaaaagtggcaccgagtcggtgccttttttgcactcacactgaccagagtgaggattgcagatttt

SEQ ID NO: 6646 - RNA, 139 nt, synthetic construct
  source 1..139: mol_type = other RNA; note = pegRNA
aattctgcaatcctcactctgttttagagctagaaatagcaagttaaaataaggctagtccgttatcaacttgaaaaagtggcaccgagtcggtgccttttttgcactcacactggccagagtgaggattgcagatttt

SEQ ID NO: 6647 - RNA, 139 nt, synthetic construct
  source 1..139: mol_type = other RNA; note = pegRNA
aattctgcaatcctcactctgttttagagctagaaatagcaagttaaaataaggctagtccgttatcaacttgaaaaagtggcaccgagtcggtgcgcttcttttttgcactcacactgaccagagtgaggattgcaga

SEQ ID NO: 6648 - RNA, 139 nt, synthetic construct
  source 1..139: mol_type = other RNA; note = pegRNA
aattctgcaatcctcactctgttttagagctagaaatagcaagttaaaataaggctagtccgttatcaacttgaaaaagtggcaccgagtcggtgcgcttcttttttgcactcacactgaccagagtgaggattgtttt

SEQ ID NO: 6649 - RNA, 139 nt, synthetic construct
  source 1..139: mol_type = other RNA; note = pegRNA
aattctgcaatcctcactctgttttagagctagaaatagcaagttaaaataaggctagtccgttatcaacttgaaaaagtggcaccgagtcggtgcgcttcttttttgcactcacactggccagagtgaggattgcaga

SEQ ID NO: 6650 - RNA, 139 nt, synthetic construct
  source 1..139: mol_type = other RNA; note = pegRNA
aattctgcaatcctcactctgttttagagctagaaatagcaagttaaaataaggctagtccgttatcaacttgaaaaagtggcaccgagtcggtgcgcttcttttttgcactcacactggccagagtgaggattgtttt

SEQ ID NO: 6651 - RNA, 139 nt, synthetic construct
  source 1..139: mol_type = other RNA; note = pegRNA
aattctgcaatcctcactctgttttagagctagaaatagcaagttaaaataaggctagtccgttatcaacttgaaaaagtggcaccgagtcggtgcggcttcttttttgcactcacactgaccagagtgaggattgcag

SEQ ID NO: 6652 - RNA, 139 nt, synthetic construct
  source 1..139: mol_type = other RNA; note = pegRNA
aattctgcaatcctcactctgttttagagctagaaatagcaagttaaaataaggctagtccgttatcaacttgaaaaagtggcaccgagtcggtgcggcttcttttttgcactcacactgaccagagtgaggatttttt

SEQ ID NO: 6653 - RNA, 139 nt, synthetic construct
  source 1..139: mol_type = other RNA; note = pegRNA
aattctgcaatcctcactctgttttagagctagaaatagcaagttaaaataaggctagtccgttatcaacttgaaaaagtggcaccgagtcggtgcggcttcttttttgcactcacactggccagagtgaggattgcag

SEQ ID NO: 6654 - RNA, 139 nt, synthetic construct
  source 1..139: mol_type = other RNA; note = pegRNA
aattctgcaatcctcactctgttttagagctagaaatagcaagttaaaataaggctagtccgttatcaacttgaaaaagtggcaccgagtcggtgcggcttcttttttgcactcacactggccagagtgaggatttttt

SEQ ID NO: 6655 - RNA, 139 nt, synthetic construct
  source 1..139: mol_type = other RNA; note = pegRNA
aattctgcaatcctcactctgttttagagctagaaatagcaagttaaaataaggctagtccgttatcaacttgaaaaagtggcaccgagtcggtgctcttttttgcactcacactgaccagagtgaggattgcagtttt

SEQ ID NO: 6656 - RNA, 139 nt, synthetic construct
  source 1..139: mol_type = other RNA; note = pegRNA
aattctgcaatcctcactctgttttagagctagaaatagcaagttaaaataaggctagtccgttatcaacttgaaaaagtggcaccgagtcggtgctcttttttgcactcacactggccagagtgaggattgcagtttt

SEQ ID NO: 6657 - RNA, 139 nt, synthetic construct
  source 1..139: mol_type = other RNA; note = pegRNA
aattctgcaatcctcactctgttttagagctagaaatagcaagttaaaataaggctagtccgttatcaacttgaaaaagtggcaccgagtcggtgctggcttcttttttgcactcacactgaccagagtgaggattgca

SEQ ID NO: 6658 - RNA, 139 nt, synthetic construct
  source 1..139: mol_type = other RNA; note = pegRNA
aattctgcaatcctcactctgttttagagctagaaatagcaagttaaaataaggctagtccgttatcaacttgaaaaagtggcaccgagtcggtgctggcttcttttttgcactcacactgaccagagtgaggattttt

SEQ ID NO: 6659 - RNA, 139 nt, synthetic construct
  source 1..139: mol_type = other RNA; note = pegRNA
aattctgcaatcctcactctgttttagagctagaaatagcaagttaaaataaggctagtccgttatcaacttgaaaaagtggcaccgagtcggtgctggcttcttttttgcactcacactggccagagtgaggattgca

SEQ ID NO: 6660 - RNA, 139 nt, synthetic construct
  source 1..139: mol_type = other RNA; note = pegRNA
aattctgcaatcctcactctgttttagagctagaaatagcaagttaaaataaggctagtccgttatcaacttgaaaaagtggcaccgagtcggtgctggcttcttttttgcactcacactggccagagtgaggattttt

SEQ ID NO: 6661 - RNA, 139 nt, synthetic construct
  source 1..139: mol_type = other RNA; note = pegRNA
aattctgcaatcctcactctgttttagagctagaaatagcaagttaaaataaggctagtccgttatcaacttgaaaaagtggcaccgagtcggtgcttcttttttgcactcacactgaccagagtgaggattgcagaat

SEQ ID NO: 6662 - RNA, 139 nt, synthetic construct
  source 1..139: mol_type = other RNA; note = pegRNA
aattctgcaatcctcactctgttttagagctagaaatagcaagttaaaataaggctagtccgttatcaacttgaaaaagtggcaccgagtcggtgcttcttttttgcactcacactgaccagagtgaggattgcatttt

SEQ ID NO: 6663 - RNA, 139 nt, synthetic construct
  source 1..139: mol_type = other RNA; note = pegRNA
aattctgcaatcctcactctgttttagagctagaaatagcaagttaaaataaggctagtccgttatcaacttgaaaaagtggcaccgagtcggtgcttcttttttgcactcacactggccagagtgaggattgcagaat

SEQ ID NO: 6664 - RNA, 139 nt, synthetic construct
  source 1..139: mol_type = other RNA; note = pegRNA
aattctgcaatcctcactctgttttagagctagaaatagcaagttaaaataaggctagtccgttatcaacttgaaaaagtggcaccgagtcggtgcttcttttttgcactcacactggccagagtgaggattgcatttt

SEQ ID NO: 6665 - RNA, 139 nt, synthetic construct
  source 1..139: mol_type = other RNA; note = pegRNA
aattctgcaatcctcactctgttttagagctagaaatagcaagttaaaataaggctagtccgttatcaacttgaaaaagtggcaccgagtcggtgcttggcttcttttttgcactcacactgaccagagtgaggattgc

SEQ ID NO: 6666 - RNA, 139 nt, synthetic construct
  source 1..139: mol_type = other RNA; note = pegRNA
aattctgcaatcctcactctgttttagagctagaaatagcaagttaaaataaggctagtccgttatcaacttgaaaaagtggcaccgagtcggtgcttggcttcttttttgcactcacactggccagagtgaggattgc

SEQ ID NO: 6667 - RNA, 139 nt, synthetic construct
  source 1..139: mol_type = other RNA; note = pegRNA
aattctgcaatcctcactctgttttagagctagaaatagcaagttaaaataaggctagtccgttatcaacttgaaaaagtggcaccgagtcggtgctttggcttcttttttgcactcacactgaccagagtgaggattg

SEQ ID NO: 6668 - RNA, 139 nt, synthetic construct
  source 1..139: mol_type = other RNA; note = pegRNA
aattctgcaatcctcactctgttttagagctagaaatagcaagttaaaataaggctagtccgttatcaacttgaaaaagtggcaccgagtcggtgctttggcttcttttttgcactcacactggccagagtgaggattg

SEQ ID NO: 6669 - RNA, 139 nt, synthetic construct
  source 1..139: mol_type = other RNA; note = pegRNA
aattctgcaatcctcactctgttttagagctagaaatagcaagttaaaataaggctagtccgttatcaacttgaaaaagtggcaccgagtcggtgctttttgcactcacactgaccagagtgaggattgcagaattttt

SEQ ID NO: 6670 - RNA, 139 nt, synthetic construct
  source 1..139: mol_type = other RNA; note = pegRNA
aattctgcaatcctcactctgttttagagctagaaatagcaagttaaaataaggctagtccgttatcaacttgaaaaagtggcaccgagtcggtgctttttgcactcacactggccagagtgaggattgcagaattttt

SEQ ID NO: 6671 - RNA, 139 nt, synthetic construct
  source 1..139: mol_type = other RNA; note = pegRNA
aattctgcaatcctcactctgttttagagctagaaatagcaagttaaaataaggctagtccgttatcaacttgaaaaagtggcaccgagtcggtgcttttttgcactcacactgaccagagtgaggattgcagaatttt

SEQ ID NO: 6672 - RNA, 139 nt, synthetic construct
  source 1..139: mol_type = other RNA; note = pegRNA
aattctgcaatcctcactctgttttagagctagaaatagcaagttaaaataaggctagtccgttatcaacttgaaaaagtggcaccgagtcggtgcttttttgcactcacactggccagagtgaggattgcagaatttt

SEQ ID NO: 6673 - RNA, 140 nt, synthetic construct
  source 1..140: mol_type = other RNA; note = pegRNA
aattctgcaatcctcactctgttttagagctagaaatagcaagttaaaataaggctagtccgttatcaacttgaaaaagtggcaccgagtcggtgccctttggcttcttttttgcactcacactgaccagagtgaggatt

SEQ ID NO: 6674 - RNA, 140 nt, synthetic construct
  source 1..140: mol_type = other RNA; note = pegRNA
aattctgcaatcctcactctgttttagagctagaaatagcaagttaaaataaggctagtccgttatcaacttgaaaaagtggcaccgagtcggtgccctttggcttcttttttgcactcacactggccagagtgaggatt

SEQ ID NO: 6675 - RNA, 140 nt, synthetic construct
  source 1..140: mol_type = other RNA; note = pegRNA
aattctgcaatcctcactctgttttagagctagaaatagcaagttaaaataaggctagtccgttatcaacttgaaaaagtggcaccgagtcggtgccttcttttttgcactcacactgaccagagtgaggattgcagaat

SEQ ID NO: 6676 - RNA, 140 nt, synthetic construct
  source 1..140: mol_type = other RNA; note = pegRNA
aattctgcaatcctcactctgttttagagctagaaatagcaagttaaaataaggctagtccgttatcaacttgaaaaagtggcaccgagtcggtgccttcttttttgcactcacactgaccagagtgaggattgcatttt

SEQ ID NO: 6677 - RNA, 140 nt, synthetic construct
  source 1..140: mol_type = other RNA; note = pegRNA
aattctgcaatcctcactctgttttagagctagaaatagcaagttaaaataaggctagtccgttatcaacttgaaaaagtggcaccgagtcggtgccttcttttttgcactcacactggccagagtgaggattgcagaat

SEQ ID NO: 6678 - RNA, 140 nt, synthetic construct
  source 1..140: mol_type = other RNA; note = pegRNA
aattctgcaatcctcactctgttttagagctagaaatagcaagttaaaataaggctagtccgttatcaacttgaaaaagtggcaccgagtcggtgccttcttttttgcactcacactggccagagtgaggattgcatttt

SEQ ID NO: 6679 - RNA, 140 nt, synthetic construct
  source 1..140: mol_type = other RNA; note = pegRNA
aattctgcaatcctcactctgttttagagctagaaatagcaagttaaaataaggctagtccgttatcaacttgaaaaagtggcaccgagtcggtgcctttggcttcttttttgcactcacactgaccagagtgaggattg

SEQ ID NO: 6680 - RNA, 140 nt, synthetic construct
  source 1..140: mol_type = other RNA; note = pegRNA
aattctgcaatcctcactctgttttagagctagaaatagcaagttaaaataaggctagtccgttatcaacttgaaaaagtggcaccgagtcggtgcctttggcttcttttttgcactcacactggccagagtgaggattg

SEQ ID NO: 6681 - RNA, 140 nt, synthetic construct
  source 1..140: mol_type = other RNA; note = pegRNA
aattctgcaatcctcactctgttttagagctagaaatagcaagttaaaataaggctagtccgttatcaacttgaaaaagtggcaccgagtcggtgccttttttgcactcacactgaccagagtgaggattgcagaatttt

SEQ ID NO: 6682 - RNA, 140 nt, synthetic construct
  source 1..140: mol_type = other RNA; note = pegRNA
aattctgcaatcctcactctgttttagagctagaaatagcaagttaaaataaggctagtccgttatcaacttgaaaaagtggcaccgagtcggtgccttttttgcactcacactggccagagtgaggattgcagaatttt

SEQ ID NO: 6683 - RNA, 140 nt, synthetic construct
  source 1..140: mol_type = other RNA; note = pegRNA
aattctgcaatcctcactctgttttagagctagaaatagcaagttaaaataaggctagtccgttatcaacttgaaaaagtggcaccgagtcggtgcgcttcttttttgcactcacactgaccagagtgaggattgcagaa

SEQ ID NO: 6684 - RNA, 140 nt, synthetic construct
  source 1..140: mol_type = other RNA; note = pegRNA
aattctgcaatcctcactctgttttagagctagaaatagcaagttaaaataaggctagtccgttatcaacttgaaaaagtggcaccgagtcggtgcgcttcttttttgcactcacactgaccagagtgaggattgctttt

SEQ ID NO: 6685 - RNA, 140 nt, synthetic construct
  source 1..140: mol_type = other RNA; note = pegRNA
aattctgcaatcctcactctgttttagagctagaaatagcaagttaaaataaggctagtccgttatcaacttgaaaaagtggcaccgagtcggtgcgcttcttttttgcactcacactggccagagtgaggattgcagaa

SEQ ID NO: 6686 - RNA, 140 nt, synthetic construct
  source 1..140: mol_type = other RNA; note = pegRNA
aattctgcaatcctcactctgttttagagctagaaatagcaagttaaaataaggctagtccgttatcaacttgaaaaagtggcaccgagtcggtgcgcttcttttttgcactcacactggccagagtgaggattgctttt

SEQ ID NO: 6687 - RNA, 140 nt, synthetic construct
  source 1..140: mol_type = other RNA; note = pegRNA
aattctgcaatcctcactctgttttagagctagaaatagcaagttaaaataaggctagtccgttatcaacttgaaaaagtggcaccgagtcggtgcggcttcttttttgcactcacactgaccagagtgaggattgcaga

SEQ ID NO: 6688 - RNA, 140 nt, synthetic construct
  source 1..140: mol_type = other RNA; note = pegRNA
aattctgcaatcctcactctgttttagagctagaaatagcaagttaaaataaggctagtccgttatcaacttgaaaaagtggcaccgagtcggtgcggcttcttttttgcactcacactgaccagagtgaggattgtttt

SEQ ID NO: 6689 - RNA, 140 nt, synthetic construct
  source 1..140: mol_type = other RNA; note = pegRNA
aattctgcaatcctcactctgttttagagctagaaatagcaagttaaaataaggctagtccgttatcaacttgaaaaagtggcaccgagtcggtgcggcttcttttttgcactcacactggccagagtgaggattgcaga

SEQ ID NO: 6690 - RNA, 140 nt, synthetic construct
  source 1..140: mol_type = other RNA; note = pegRNA
aattctgcaatcctcactctgttttagagctagaaatagcaagttaaaataaggctagtccgttatcaacttgaaaaagtggcaccgagtcggtgcggcttcttttttgcactcacactggccagagtgaggattgtttt

SEQ ID NO: 6691 - RNA, 140 nt, synthetic construct
  source 1..140: mol_type = other RNA; note = pegRNA
aattctgcaatcctcactctgttttagagctagaaatagcaagttaaaataaggctagtccgttatcaacttgaaaaagtggcaccgagtcggtgctcctttggcttcttttttgcactcacactgaccagagtgaggat

SEQ ID NO: 6692 - RNA, 140 nt, synthetic construct
  source 1..140: mol_type = other RNA; note = pegRNA
aattctgcaatcctcactctgttttagagctagaaatagcaagttaaaataaggctagtccgttatcaacttgaaaaagtggcaccgagtcggtgctcctttggcttcttttttgcactcacactggccagagtgaggat

SEQ ID NO: 6693 - RNA, 140 nt, synthetic construct
  source 1..140: mol_type = other RNA; note = pegRNA
aattctgcaatcctcactctgttttagagctagaaatagcaagttaaaataaggctagtccgttatcaacttgaaaaagtggcaccgagtcggtgctcttttttgcactcacactgaccagagtgaggattgcagatttt

SEQ ID NO: 6694 - RNA, 140 nt, synthetic construct
  source 1..140: mol_type = other RNA; note = pegRNA
aattctgcaatcctcactctgttttagagctagaaatagcaagttaaaataaggctagtccgttatcaacttgaaaaagtggcaccgagtcggtgctcttttttgcactcacactggccagagtgaggattgcagatttt

SEQ ID NO: 6695 - RNA, 140 nt, synthetic construct
  source 1..140: mol_type = other RNA; note = pegRNA
aattctgcaatcctcactctgttttagagctagaaatagcaagttaaaataaggctagtccgttatcaacttgaaaaagtggcaccgagtcggtgctggcttcttttttgcactcacactgaccagagtgaggattgcag

SEQ ID NO: 6696 - RNA, 140 nt, synthetic construct
  source 1..140: mol_type = other RNA; note = pegRNA
aattctgcaatcctcactctgttttagagctagaaatagcaagttaaaataaggctagtccgttatcaacttgaaaaagtggcaccgagtcggtgctggcttcttttttgcactcacactgaccagagtgaggatttttt

SEQ ID NO: 6697 - RNA, 140 nt, synthetic construct
  source 1..140: mol_type = other RNA; note = pegRNA
aattctgcaatcctcactctgttttagagctagaaatagcaagttaaaataaggctagtccgttatcaacttgaaaaagtggcaccgagtcggtgctggcttcttttttgcactcacactggccagagtgaggattgcag

SEQ ID NO: 6698 - RNA, 140 nt, synthetic construct
  source 1..140: mol_type = other RNA; note = pegRNA
aattctgcaatcctcactctgttttagagctagaaatagcaagttaaaataaggctagtccgttatcaacttgaaaaagtggcaccgagtcggtgctggcttcttttttgcactcacactggccagagtgaggatttttt

SEQ ID NO: 6699 - RNA, 140 nt, synthetic construct
  source 1..140: mol_type = other RNA; note = pegRNA
aattctgcaatcctcactctgttttagagctagaaatagcaagttaaaataaggctagtccgttatcaacttgaaaaagtggcaccgagtcggtgcttcttttttgcactcacactgaccagagtgaggattgcagtttt

SEQ ID NO: 6700 - RNA, 140 nt, synthetic construct
  source 1..140: mol_type = other RNA; note = pegRNA
aattctgcaatcctcactctgttttagagctagaaatagcaagttaaaataaggctagtccgttatcaacttgaaaaagtggcaccgagtcggtgcttcttttttgcactcacactggccagagtgaggattgcagtttt

SEQ ID NO: 6701 - RNA, 140 nt, synthetic construct
  source 1..140: mol_type = other RNA; note = pegRNA
aattctgcaatcctcactctgttttagagctagaaatagcaagttaaaataaggctagtccgttatcaacttgaaaaagtggcaccgagtcggtgcttggcttcttttttgcactcacactgaccagagtgaggattgca

SEQ ID NO: 6702 - RNA, 140 nt, synthetic construct
  source 1..140: mol_type = other RNA; note = pegRNA
aattctgcaatcctcactctgttttagagctagaaatagcaagttaaaataaggctagtccgttatcaacttgaaaaagtggcaccgagtcggtgcttggcttcttttttgcactcacactgaccagagtgaggattttt

SEQ ID NO: 6703 - RNA, 140 nt, synthetic construct
  source 1..140: mol_type = other RNA; note = pegRNA
aattctgcaatcctcactctgttttagagctagaaatagcaagttaaaataaggctagtccgttatcaacttgaaaaagtggcaccgagtcggtgcttggcttcttttttgcactcacactggccagagtgaggattgca

SEQ ID NO: 6704 - RNA, 140 nt, synthetic construct
  source 1..140: mol_type = other RNA; note = pegRNA
aattctgcaatcctcactctgttttagagctagaaatagcaagttaaaataaggctagtccgttatcaacttgaaaaagtggcaccgagtcggtgcttggcttcttttttgcactcacactggccagagtgaggattttt

SEQ ID NO: 6705 - RNA, 140 nt, synthetic construct
  source 1..140: mol_type = other RNA; note = pegRNA
aattctgcaatcctcactctgttttagagctagaaatagcaagttaaaataaggctagtccgttatcaacttgaaaaagtggcaccgagtcggtgctttggcttcttttttgcactcacactgaccagagtgaggattgc

SEQ ID NO: 6706 - RNA, 140 nt, synthetic construct
  source 1..140: mol_type = other RNA; note = pegRNA
aattctgcaatcctcactctgttttagagctagaaatagcaagttaaaataaggctagtccgttatcaacttgaaaaagtggcaccgagtcggtgctttggcttcttttttgcactcacactggccagagtgaggattgc

SEQ ID NO: 6707 - RNA, 140 nt, synthetic construct
  source 1..140: mol_type = other RNA; note = pegRNA
aattctgcaatcctcactctgttttagagctagaaatagcaagttaaaataaggctagtccgttatcaacttgaaaaagtggcaccgagtcggtgcttttttgcactcacactgaccagagtgaggattgcagaattttt

SEQ ID NO: 6708 - RNA, 140 nt, synthetic construct
  source 1..140: mol_type = other RNA; note = pegRNA
aattctgcaatcctcactctgttttagagctagaaatagcaagttaaaataaggctagtccgttatcaacttgaaaaagtggcaccgagtcggtgcttttttgcactcacactggccagagtgaggattgcagaattttt

SEQ ID NO: 6709 - RNA, 141 nt, synthetic construct
  source 1..141: mol_type = other RNA; note = pegRNA
aattctgcaatcctcactctgttttagagctagaaatagcaagttaaaataaggctagtccgttatcaacttgaaaaagtggcaccgagtcggtgccctttggcttcttttttgcactcacactgaccagagtgaggattg

SEQ ID NO: 6710 - RNA, 141 nt, synthetic construct
  source 1..141: mol_type = other RNA; note = pegRNA
aattctgcaatcctcactctgttttagagctagaaatagcaagttaaaataaggctagtccgttatcaacttgaaaaagtggcaccgagtcggtgccctttggcttcttttttgcactcacactggccagagtgaggattg

SEQ ID NO: 6711 - RNA, 141 nt, synthetic construct
  source 1..141: mol_type = other RNA; note = pegRNA
aattctgcaatcctcactctgttttagagctagaaatagcaagttaaaataaggctagtccgttatcaacttgaaaaagtggcaccgagtcggtgccttcttttttgcactcacactgaccagagtgaggattgcagtttt

SEQ ID NO: 6712 - RNA, 141 nt, synthetic construct
  source 1..141: mol_type = other RNA; note = pegRNA
aattctgcaatcctcactctgttttagagctagaaatagcaagttaaaataaggctagtccgttatcaacttgaaaaagtggcaccgagtcggtgccttcttttttgcactcacactggccagagtgaggattgcagtttt

SEQ ID NO: 6713 - RNA, 141 nt, synthetic construct
  source 1..141: mol_type = other RNA; note = pegRNA
aattctgcaatcctcactctgttttagagctagaaatagcaagttaaaataaggctagtccgttatcaacttgaaaaagtggcaccgagtcggtgcctttggcttcttttttgcactcacactgaccagagtgaggattgc

SEQ ID NO: 6714 - RNA, 141 nt, synthetic construct
  source 1..141: mol_type = other RNA; note = pegRNA
aattctgcaatcctcactctgttttagagctagaaatagcaagttaaaataaggctagtccgttatcaacttgaaaaagtggcaccgagtcggtgcctttggcttcttttttgcactcacactggccagagtgaggattgc

SEQ ID NO: 6715 - RNA, 141 nt, synthetic construct
  source 1..141: mol_type = other RNA; note = pegRNA
aattctgcaatcctcactctgttttagagctagaaatagcaagttaaaataaggctagtccgttatcaacttgaaaaagtggcaccgagtcggtgccttttttgcactcacactgaccagagtgaggattgcagaattttt

SEQ ID NO: 6716 - RNA, 141 nt, synthetic construct
  source 1..141: mol_type = other RNA; note = pegRNA
aattctgcaatcctcactctgttttagagctagaaatagcaagttaaaataaggctagtccgttatcaacttgaaaaagtggcaccgagtcggtgccttttttgcactcacactggccagagtgaggattgcagaattttt

SEQ ID NO: 6717 - RNA, 141 nt, synthetic construct
  source 1..141: mol_type = other RNA; note = pegRNA
aattctgcaatcctcactctgttttagagctagaaatagcaagttaaaataaggctagtccgttatcaacttgaaaaagtggcaccgagtcggtgcgcttcttttttgcactcacactgaccagagtgaggattgcagaat

SEQ ID NO: 6718 - RNA, 141 nt, synthetic construct
  source 1..141: mol_type = other RNA; note = pegRNA
aattctgcaatcctcactctgttttagagctagaaatagcaagttaaaataaggctagtccgttatcaacttgaaaaagtggcaccgagtcggtgcgcttcttttttgcactcacactgaccagagtgaggattgcatttt

SEQ ID NO: 6719 - RNA, 141 nt, synthetic construct
  source 1..141: mol_type = other RNA; note = pegRNA
aattctgcaatcctcactctgttttagagctagaaatagcaagttaaaataaggctagtccgttatcaacttgaaaaagtggcaccgagtcggtgcgcttcttttttgcactcacactggccagagtgaggattgcagaat

SEQ ID NO: 6720 - RNA, 141 nt, synthetic construct
  source 1..141: mol_type = other RNA; note = pegRNA
aattctgcaatcctcactctgttttagagctagaaatagcaagttaaaataaggctagtccgttatcaacttgaaaaagtggcaccgagtcggtgcgcttcttttttgcactcacactggccagagtgaggattgcatttt

SEQ ID NO: 6721 - RNA, 141 nt, synthetic construct
  source 1..141: mol_type = other RNA; note = pegRNA
aattctgcaatcctcactctgttttagagctagaaatagcaagttaaaataaggctagtccgttatcaacttgaaaaagtggcaccgagtcggtgcggcttcttttttgcactcacactgaccagagtgaggattgcagaa

SEQ ID NO: 6722 - RNA, 141 nt, synthetic construct
  source 1..141: mol_type = other RNA; note = pegRNA
aattctgcaatcctcactctgttttagagctagaaatagcaagttaaaataaggctagtccgttatcaacttgaaaaagtggcaccgagtcggtgcggcttcttttttgcactcacactgaccagagtgaggattgctttt

SEQ ID NO: 6723 - RNA, 141 nt, synthetic construct
  source 1..141: mol_type = other RNA; note = pegRNA
aattctgcaatcctcactctgttttagagctagaaatagcaagttaaaataaggctagtccgttatcaacttgaaaaagtggcaccgagtcggtgcggcttcttttttgcactcacactggccagagtgaggattgcagaa

SEQ ID NO: 6724 - RNA, 141 nt, synthetic construct
  source 1..141: mol_type = other RNA; note = pegRNA
aattctgcaatcctcactctgttttagagctagaaatagcaagttaaaataaggctagtccgttatcaacttgaaaaagtggcaccgagtcggtgcggcttcttttttgcactcacactggccagagtgaggattgctttt

SEQ ID NO: 6725 - RNA, 141 nt, synthetic construct
  source 1..141: mol_type = other RNA; note = pegRNA
aattctgcaatcctcactctgttttagagctagaaatagcaagttaaaataaggctagtccgttatcaacttgaaaaagtggcaccgagtcggtgcgtcctttggcttcttttttgcactcacactgaccagagtgaggat

SEQ ID NO: 6726 - RNA, 141 nt, synthetic construct
  source 1..141: mol_type = other RNA; note = pegRNA
aattctgcaatcctcactctgttttagagctagaaatagcaagttaaaataaggctagtccgttatcaacttgaaaaagtggcaccgagtcggtgcgtcctttggcttcttttttgcactcacactggccagagtgaggat

SEQ ID NO: 6727 - RNA, 141 nt, synthetic construct
  source 1..141: mol_type = other RNA; note = pegRNA
aattctgcaatcctcactctgttttagagctagaaatagcaagttaaaataaggctagtccgttatcaacttgaaaaagtggcaccgagtcggtgctcctttggcttcttttttgcactcacactgaccagagtgaggatt

SEQ ID NO: 6728 - RNA, 141 nt, synthetic construct
  source 1..141: mol_type = other RNA; note = pegRNA
aattctgcaatcctcactctgttttagagctagaaatagcaagttaaaataaggctagtccgttatcaacttgaaaaagtggcaccgagtcggtgctcctttggcttcttttttgcactcacactggccagagtgaggatt

SEQ ID NO: 6729 - RNA, 141 nt, synthetic construct
  source 1..141: mol_type = other RNA; note = pegRNA
aattctgcaatcctcactctgttttagagctagaaatagcaagttaaaataaggctagtccgttatcaacttgaaaaagtggcaccgagtcggtgctcttttttgcactcacactgaccagagtgaggattgcagaatttt

SEQ ID NO: 6730 - RNA, 141 nt, synthetic construct
  source 1..141: mol_type = other RNA; note = pegRNA
aattctgcaatcctcactctgttttagagctagaaatagcaagttaaaataaggctagtccgttatcaacttgaaaaagtggcaccgagtcggtgctcttttttgcactcacactggccagagtgaggattgcagaatttt

SEQ ID NO: 6731 - RNA, 141 nt, synthetic construct
  source 1..141: mol_type = other RNA; note = pegRNA
aattctgcaatcctcactctgttttagagctagaaatagcaagttaaaataaggctagtccgttatcaacttgaaaaagtggcaccgagtcggtgctggcttcttttttgcactcacactgaccagagtgaggattgcaga

SEQ ID NO: 6732 - RNA, 141 nt, synthetic construct
  source 1..141: mol_type = other RNA; note = pegRNA
aattctgcaatcctcactctgttttagagctagaaatagcaagttaaaataaggctagtccgttatcaacttgaaaaagtggcaccgagtcggtgctggcttcttttttgcactcacactgaccagagtgaggattgtttt

SEQ ID NO: 6733 - RNA, 141 nt, synthetic construct
  source 1..141: mol_type = other RNA; note = pegRNA
aattctgcaatcctcactctgttttagagctagaaatagcaagttaaaataaggctagtccgttatcaacttgaaaaagtggcaccgagtcggtgctggcttcttttttgcactcacactggccagagtgaggattgcaga

SEQ ID NO: 6734 - RNA, 141 nt, synthetic construct
  source 1..141: mol_type = other RNA; note = pegRNA
aattctgcaatcctcactctgttttagagctagaaatagcaagttaaaataaggctagtccgttatcaacttgaaaaagtggcaccgagtcggtgctggcttcttttttgcactcacactggccagagtgaggattgtttt

SEQ ID NO: 6735 - RNA, 141 nt, synthetic construct
  source 1..141: mol_type = other RNA; note = pegRNA
aattctgcaatcctcactctgttttagagctagaaatagcaagttaaaataaggctagtccgttatcaacttgaaaaagtggcaccgagtcggtgcttcttttttgcactcacactgaccagagtgaggattgcagatttt

SEQ ID NO: 6736 - RNA, 141 nt, synthetic construct
  source 1..141: mol_type = other RNA; note = pegRNA
aattctgcaatcctcactctgttttagagctagaaatagcaagttaaaataaggctagtccgttatcaacttgaaaaagtggcaccgagtcggtgcttcttttttgcactcacactggccagagtgaggattgcagatttt

SEQ ID NO: 6737 - RNA, 141 nt, synthetic construct
  source 1..141: mol_type = other RNA; note = pegRNA
aattctgcaatcctcactctgttttagagctagaaatagcaagttaaaataaggctagtccgttatcaacttgaaaaagtggcaccgagtcggtgcttggcttcttttttgcactcacactgaccagagtgaggattgcag

SEQ ID NO: 6738 - RNA, 141 nt, synthetic construct
  source 1..141: mol_type = other RNA; note = pegRNA
aattctgcaatcctcactctgttttagagctagaaatagcaagttaaaataaggctagtccgttatcaacttgaaaaagtggcaccgagtcggtgcttggcttcttttttgcactcacactgaccagagtgaggatttttt

SEQ ID NO: 6739 - RNA, 141 nt, synthetic construct
  source 1..141: mol_type = other RNA; note = pegRNA
aattctgcaatcctcactctgttttagagctagaaatagcaagttaaaataaggctagtccgttatcaacttgaaaaagtggcaccgagtcggtgcttggcttcttttttgcactcacactggccagagtgaggattgcag

SEQ ID NO: 6740 - RNA, 141 nt, synthetic construct
  source 1..141: mol_type = other RNA; note = pegRNA
aattctgcaatcctcactctgttttagagctagaaatagcaagttaaaataaggctagtccgttatcaacttgaaaaagtggcaccgagtcggtgcttggcttcttttttgcactcacactggccagagtgaggatttttt

SEQ ID NO: 6741 - RNA, 141 nt, synthetic construct
  source 1..141: mol_type = other RNA; note = pegRNA
aattctgcaatcctcactctgttttagagctagaaatagcaagttaaaataaggctagtccgttatcaacttgaaaaagtggcaccgagtcggtgctttggcttcttttttgcactcacactgaccagagtgaggattgca

SEQ ID NO: 6742 - RNA, 141 nt, synthetic construct
  source 1..141: mol_type = other RNA; note = pegRNA
aattctgcaatcctcactctgttttagagctagaaatagcaagttaaaataaggctagtccgttatcaacttgaaaaagtggcaccgagtcggtgctttggcttcttttttgcactcacactgaccagagtgaggattttt

SEQ ID NO: 6743 - RNA, 141 nt, synthetic construct
  source 1..141: mol_type = other RNA; note = pegRNA
aattctgcaatcctcactctgttttagagctagaaatagcaagttaaaataaggctagtccgttatcaacttgaaaaagtggcaccgagtcggtgctttggcttcttttttgcactcacactggccagagtgaggattgca

SEQ ID NO: 6744 - RNA, 141 nt, synthetic construct
  source 1..141: mol_type = other RNA; note = pegRNA
aattctgcaatcctcactctgttttagagctagaaatagcaagttaaaataaggctagtccgttatcaacttgaaaaagtggcaccgagtcggtgctttggcttcttttttgcactcacactggccagagtgaggattttt

SEQ ID NO: 6745 - RNA, 142 nt, synthetic construct
  source 1..142: mol_type = other RNA; note = pegRNA
aattctgcaatcctcactctgttttagagctagaaatagcaagttaaaataaggctagtccgttatcaacttgaaaaagtggcaccgagtcggtgcagtcctttggcttcttttttgcactcacactgaccagagtgaggat

SEQ ID NO: 6746 - RNA, 142 nt, synthetic construct
  source 1..142: mol_type = other RNA; note = pegRNA
aattctgcaatcctcactctgttttagagctagaaatagcaagttaaaataaggctagtccgttatcaacttgaaaaagtggcaccgagtcggtgcagtcctttggcttcttttttgcactcacactggccagagtgaggat

SEQ ID NO: 6747 - RNA, 142 nt, synthetic construct
  source 1..142: mol_type = other RNA; note = pegRNA
aattctgcaatcctcactctgttttagagctagaaatagcaagttaaaataaggctagtccgttatcaacttgaaaaagtggcaccgagtcggtgccctttggcttcttttttgcactcacactgaccagagtgaggattgc

SEQ ID NO: 6748 - RNA, 142 nt, synthetic construct
  source 1..142: mol_type = other RNA; note = pegRNA
aattctgcaatcctcactctgttttagagctagaaatagcaagttaaaataaggctagtccgttatcaacttgaaaaagtggcaccgagtcggtgccctttggcttcttttttgcactcacactggccagagtgaggattgc

SEQ ID NO: 6749 - RNA, 142 nt, synthetic construct
  source 1..142: mol_type = other RNA; note = pegRNA
aattctgcaatcctcactctgttttagagctagaaatagcaagttaaaataaggctagtccgttatcaacttgaaaaagtggcaccgagtcggtgccttcttttttgcactcacactgaccagagtgaggattgcagatttt

SEQ ID NO: 6750 - RNA, 142 nt, synthetic construct
  source 1..142: mol_type = other RNA; note = pegRNA
aattctgcaatcctcactctgttttagagctagaaatagcaagttaaaataaggctagtccgttatcaacttgaaaaagtggcaccgagtcggtgccttcttttttgcactcacactggccagagtgaggattgcagatttt

SEQ ID NO: 6751 - RNA, 142 nt, synthetic construct
  source 1..142: mol_type = other RNA; note = pegRNA
aattctgcaatcctcactctgttttagagctagaaatagcaagttaaaataaggctagtccgttatcaacttgaaaaagtggcaccgagtcggtgcctttggcttcttttttgcactcacactgaccagagtgaggattgca

SEQ ID NO: 6752 - RNA, 142 nt, synthetic construct
  source 1..142: mol_type = other RNA; note = pegRNA
aattctgcaatcctcactctgttttagagctagaaatagcaagttaaaataaggctagtccgttatcaacttgaaaaagtggcaccgagtcggtgcctttggcttcttttttgcactcacactgaccagagtgaggattttt

SEQ ID NO: 6753 - RNA, 142 nt, synthetic construct
  source 1..142: mol_type = other RNA; note = pegRNA
aattctgcaatcctcactctgttttagagctagaaatagcaagttaaaataaggctagtccgttatcaacttgaaaaagtggcaccgagtcggtgcctttggcttcttttttgcactcacactggccagagtgaggattgca

SEQ ID NO: 6754 - RNA, 142 nt, synthetic construct
  source 1..142: mol_type = other RNA; note = pegRNA
aattctgcaatcctcactctgttttagagctagaaatagcaagttaaaataaggctagtccgttatcaacttgaaaaagtggcaccgagtcggtgcctttggcttcttttttgcactcacactggccagagtgaggattttt

SEQ ID NO: 6755 - RNA, 142 nt, synthetic construct
  source 1..142: mol_type = other RNA; note = pegRNA
aattctgcaatcctcactctgttttagagctagaaatagcaagttaaaataaggctagtccgttatcaacttgaaaaagtggcaccgagtcggtgcgcttcttttttgcactcacactgaccagagtgaggattgcagtttt

SEQ ID NO: 6756 - RNA, 142 nt, synthetic construct
  source 1..142: mol_type = other RNA; note = pegRNA
aattctgcaatcctcactctgttttagagctagaaatagcaagttaaaataaggctagtccgttatcaacttgaaaaagtggcaccgagtcggtgcgcttcttttttgcactcacactggccagagtgaggattgcagtttt

SEQ ID NO: 6757 - RNA, 142 nt, synthetic construct
  source 1..142: mol_type = other RNA; note = pegRNA
aattctgcaatcctcactctgttttagagctagaaatagcaagttaaaataaggctagtccgttatcaacttgaaaaagtggcaccgagtcggtgcggcttcttttttgcactcacactgaccagagtgaggattgcagaat

SEQ ID NO: 6758 - RNA, 142 nt, synthetic construct
  source 1..142: mol_type = other RNA; note = pegRNA
aattctgcaatcctcactctgttttagagctagaaatagcaagttaaaataaggctagtccgttatcaacttgaaaaagtggcaccgagtcggtgcggcttcttttttgcactcacactgaccagagtgaggattgcatttt

SEQ ID NO: 6759 - RNA, 142 nt, synthetic construct
  source 1..142: mol_type = other RNA; note = pegRNA
aattctgcaatcctcactctgttttagagctagaaatagcaagttaaaataaggctagtccgttatcaacttgaaaaagtggcaccgagtcggtgcggcttcttttttgcactcacactggccagagtgaggattgcagaat

SEQ ID NO: 6760 - RNA, 142 nt, synthetic construct
  source 1..142: mol_type = other RNA; note = pegRNA
aattctgcaatcctcactctgttttagagctagaaatagcaagttaaaataaggctagtccgttatcaacttgaaaaagtggcaccgagtcggtgcggcttcttttttgcactcacactggccagagtgaggattgcatttt

SEQ ID NO: 6761 - RNA, 142 nt, synthetic construct
  source 1..142: mol_type = other RNA; note = pegRNA
aattctgcaatcctcactctgttttagagctagaaatagcaagttaaaataaggctagtccgttatcaacttgaaaaagtggcaccgagtcggtgcgtcctttggcttcttttttgcactcacactgaccagagtgaggatt

SEQ ID NO: 6762 - RNA, 142 nt, synthetic construct
  source 1..142: mol_type = other RNA; note = pegRNA
aattctgcaatcctcactctgttttagagctagaaatagcaagttaaaataaggctagtccgttatcaacttgaaaaagtggcaccgagtcggtgcgtcctttggcttcttttttgcactcacactggccagagtgaggatt

SEQ ID NO: 6763 - RNA, 142 nt, synthetic construct
  source 1..142: mol_type = other RNA; note = pegRNA
aattctgcaatcctcactctgttttagagctagaaatagcaagttaaaataaggctagtccgttatcaacttgaaaaagtggcaccgagtcggtgctcctttggcttcttttttgcactcacactgaccagagtgaggattg

SEQ ID NO: 6764 - RNA, 142 nt, synthetic construct
  source 1..142: mol_type = other RNA; note = pegRNA
aattctgcaatcctcactctgttttagagctagaaatagcaagttaaaataaggctagtccgttatcaacttgaaaaagtggcaccgagtcggtgctcctttggcttcttttttgcactcacactggccagagtgaggattg

SEQ ID NO: 6765 - RNA, 142 nt, synthetic construct
  source 1..142: mol_type = other RNA; note = pegRNA
aattctgcaatcctcactctgttttagagctagaaatagcaagttaaaataaggctagtccgttatcaacttgaaaaagtggcaccgagtcggtgctcttttttgcactcacactgaccagagtgaggattgcagaattttt

SEQ ID NO: 6766 - RNA, 142 nt, synthetic construct
  source 1..142: mol_type = other RNA; note = pegRNA
aattctgcaatcctcactctgttttagagctagaaatagcaagttaaaataaggctagtccgttatcaacttgaaaaagtggcaccgagtcggtgctcttttttgcactcacactggccagagtgaggattgcagaattttt

SEQ ID NO: 6767 - RNA, 142 nt, synthetic construct
  source 1..142: mol_type = other RNA; note = pegRNA
aattctgcaatcctcactctgttttagagctagaaatagcaagttaaaataaggctagtccgttatcaacttgaaaaagtggcaccgagtcggtgctggcttcttttttgcactcacactgaccagagtgaggattgcagaa

SEQ ID NO: 6768 - RNA, 142 nt, synthetic construct
  source 1..142: mol_type = other RNA; note = pegRNA
aattctgcaatcctcactctgttttagagctagaaatagcaagttaaaataaggctagtccgttatcaacttgaaaaagtggcaccgagtcggtgctggcttcttttttgcactcacactgaccagagtgaggattgctttt

SEQ ID NO: 6769 - RNA, 142 nt, synthetic construct
  source 1..142: mol_type = other RNA; note = pegRNA
aattctgcaatcctcactctgttttagagctagaaatagcaagttaaaataaggctagtccgttatcaacttgaaaaagtggcaccgagtcggtgctggcttcttttttgcactcacactggccagagtgaggattgcagaa

SEQ ID NO: 6770 - RNA, 142 nt, synthetic construct
  source 1..142: mol_type = other RNA; note = pegRNA
aattctgcaatcctcactctgttttagagctagaaatagcaagttaaaataaggctagtccgttatcaacttgaaaaagtggcaccgagtcggtgctggcttcttttttgcactcacactggccagagtgaggattgctttt

SEQ ID NO: 6771 - RNA, 142 nt, synthetic construct
  source 1..142: mol_type = other RNA; note = pegRNA
aattctgcaatcctcactctgttttagagctagaaatagcaagttaaaataaggctagtccgttatcaacttgaaaaagtggcaccgagtcggtgcttcttttttgcactcacactgaccagagtgaggattgcagaatttt

SEQ ID NO: 6772 - RNA, 142 nt, synthetic construct
  source 1..142: mol_type = other RNA; note = pegRNA
aattctgcaatcctcactctgttttagagctagaaatagcaagttaaaataaggctagtccgttatcaacttgaaaaagtggcaccgagtcggtgcttcttttttgcactcacactggccagagtgaggattgcagaatttt

SEQ ID NO: 6773 - RNA, 142 nt, synthetic construct
  source 1..142: mol_type = other RNA; note = pegRNA
aattctgcaatcctcactctgttttagagctagaaatagcaagttaaaataaggctagtccgttatcaacttgaaaaagtggcaccgagtcggtgcttggcttcttttttgcactcacactgaccagagtgaggattgcaga

SEQ ID NO: 6774 - RNA, 142 nt, synthetic construct
  source 1..142: mol_type = other RNA; note = pegRNA
aattctgcaatcctcactctgttttagagctagaaatagcaagttaaaataaggctagtccgttatcaacttgaaaaagtggcaccgagtcggtgcttggcttcttttttgcactcacactgaccagagtgaggattgtttt

SEQ ID NO: 6775 - RNA, 142 nt, synthetic construct
  source 1..142: mol_type = other RNA; note = pegRNA
aattctgcaatcctcactctgttttagagctagaaatagcaagttaaaataaggctagtccgttatcaacttgaaaaagtggcaccgagtcggtgcttggcttcttttttgcactcacactggccagagtgaggattgcaga

SEQ ID NO: 6776 - RNA, 142 nt, synthetic construct
  source 1..142: mol_type = other RNA; note = pegRNA
aattctgcaatcctcactctgttttagagctagaaatagcaagttaaaataaggctagtccgttatcaacttgaaaaagtggcaccgagtcggtgcttggcttcttttttgcactcacactggccagagtgaggattgtttt

SEQ ID NO: 6777 - RNA, 142 nt, synthetic construct
  source 1..142: mol_type = other RNA; note = pegRNA
aattctgcaatcctcactctgttttagagctagaaatagcaagttaaaataaggctagtccgttatcaacttgaaaaagtggcaccgagtcggtgctttggcttcttttttgcactcacactgaccagagtgaggattgcag

SEQ ID NO: 6778 - RNA, 142 nt, synthetic construct
  source 1..142: mol_type = other RNA; note = pegRNA
aattctgcaatcctcactctgttttagagctagaaatagcaagttaaaataaggctagtccgttatcaacttgaaaaagtggcaccgagtcggtgctttggcttcttttttgcactcacactgaccagagtgaggatttttt

SEQ ID NO: 6779 - RNA, 142 nt, synthetic construct
  source 1..142: mol_type = other RNA; note = pegRNA
aattctgcaatcctcactctgttttagagctagaaatagcaagttaaaataaggctagtccgttatcaacttgaaaaagtggcaccgagtcggtgctttggcttcttttttgcactcacactggccagagtgaggattgcag

SEQ ID NO: 6780 - RNA, 142 nt, synthetic construct
  source 1..142: mol_type = other RNA; note = pegRNA
aattctgcaatcctcactctgttttagagctagaaatagcaagttaaaataaggctagtccgttatcaacttgaaaaagtggcaccgagtcggtgctttggcttcttttttgcactcacactggccagagtgaggatttttt

SEQ ID NO: 6781 - RNA, 143 nt, synthetic construct
  source 1..143: mol_type = other RNA; note = pegRNA
aattctgcaatcctcactctgttttagagctagaaatagcaagttaaaataaggctagtccgttatcaacttgaaaaagtggcaccgagtcggtgcaagtcctttggcttcttttttgcactcacactgaccagagtgaggat

SEQ ID NO: 6782 - RNA, 143 nt, synthetic construct
  source 1..143: mol_type = other RNA; note = pegRNA
aattctgcaatcctcactctgttttagagctagaaatagcaagttaaaataaggctagtccgttatcaacttgaaaaagtggcaccgagtcggtgcaagtcctttggcttcttttttgcactcacactggccagagtgaggat

SEQ ID NO: 6783 - RNA, 143 nt, synthetic construct
  source 1..143: mol_type = other RNA; note = pegRNA
aattctgcaatcctcactctgttttagagctagaaatagcaagttaaaataaggctagtccgttatcaacttgaaaaagtggcaccgagtcggtgcagtcctttggcttcttttttgcactcacactgaccagagtgaggatt

SEQ ID NO: 6784 - RNA, 143 nt, synthetic construct
  source 1..143: mol_type = other RNA; note = pegRNA
aattctgcaatcctcactctgttttagagctagaaatagcaagttaaaataaggctagtccgttatcaacttgaaaaagtggcaccgagtcggtgcagtcctttggcttcttttttgcactcacactggccagagtgaggatt

SEQ ID NO: 6785 - RNA, 143 nt, synthetic construct
  source 1..143: mol_type = other RNA; note = pegRNA
aattctgcaatcctcactctgttttagagctagaaatagcaagttaaaataaggctagtccgttatcaacttgaaaaagtggcaccgagtcggtgccctttggcttcttttttgcactcacactgaccagagtgaggattgca

SEQ ID NO: 6786 - RNA, 143 nt, synthetic construct
  source 1..143: mol_type = other RNA; note = pegRNA
aattctgcaatcctcactctgttttagagctagaaatagcaagttaaaataaggctagtccgttatcaacttgaaaaagtggcaccgagtcggtgccctttggcttcttttttgcactcacactgaccagagtgaggattttt

SEQ ID NO: 6787 - RNA, 143 nt, synthetic construct
  source 1..143: mol_type = other RNA; note = pegRNA
aattctgcaatcctcactctgttttagagctagaaatagcaagttaaaataaggctagtccgttatcaacttgaaaaagtggcaccgagtcggtgccctttggcttcttttttgcactcacactggccagagtgaggattgca

SEQ ID NO: 6788 - RNA, 143 nt, synthetic construct
  source 1..143: mol_type = other RNA; note = pegRNA
aattctgcaatcctcactctgttttagagctagaaatagcaagttaaaataaggctagtccgttatcaacttgaaaaagtggcaccgagtcggtgccctttggcttcttttttgcactcacactggccagagtgaggattttt

SEQ ID NO: 6789 - RNA, 143 nt, synthetic construct
  source 1..143: mol_type = other RNA; note = pegRNA
aattctgcaatcctcactctgttttagagctagaaatagcaagttaaaataaggctagtccgttatcaacttgaaaaagtggcaccgagtcggtgccttcttttttgcactcacactgaccagagtgaggattgcagaatttt

SEQ ID NO: 6790 - RNA, 143 nt, synthetic construct
  source 1..143: mol_type = other RNA; note = pegRNA
aattctgcaatcctcactctgttttagagctagaaatagcaagttaaaataaggctagtccgttatcaacttgaaaaagtggcaccgagtcggtgccttcttttttgcactcacactggccagagtgaggattgcagaatttt

SEQ ID NO: 6791 - RNA, 143 nt, synthetic construct
  source 1..143: mol_type = other RNA; note = pegRNA
aattctgcaatcctcactctgttttagagctagaaatagcaagttaaaataaggctagtccgttatcaacttgaaaaagtggcaccgagtcggtgcctttggcttcttttttgcactcacactgaccagagtgaggattgcag

SEQ ID NO: 6792 - RNA, 143 nt, synthetic construct
  source 1..143: mol_type = other RNA; note = pegRNA
aattctgcaatcctcactctgttttagagctagaaatagcaagttaaaataaggctagtccgttatcaacttgaaaaagtggcaccgagtcggtgcctttggcttcttttttgcactcacactgaccagagtgaggatttttt

SEQ ID NO: 6793 - RNA, 143 nt, synthetic construct
  source 1..143: mol_type = other RNA; note = pegRNA
aattctgcaatcctcactctgttttagagctagaaatagcaagttaaaataaggctagtccgttatcaacttgaaaaagtggcaccgagtcggtgcctttggcttcttttttgcactcacactggccagagtgaggattgcag

SEQ ID NO: 6794 - RNA, 143 nt, synthetic construct
  source 1..143: mol_type = other RNA; note = pegRNA
aattctgcaatcctcactctgttttagagctagaaatagcaagttaaaataaggctagtccgttatcaacttgaaaaagtggcaccgagtcggtgcctttggcttcttttttgcactcacactggccagagtgaggatttttt

SEQ ID NO: 6795 - RNA, 143 nt, synthetic construct
  source 1..143: mol_type = other RNA; note = pegRNA
aattctgcaatcctcactctgttttagagctagaaatagcaagttaaaataaggctagtccgttatcaacttgaaaaagtggcaccgagtcggtgcgcttcttttttgcactcacactgaccagagtgaggattgcagatttt

SEQ ID NO: 6796 - RNA, 143 nt, synthetic construct
  source 1..143: mol_type = other RNA; note = pegRNA
aattctgcaatcctcactctgttttagagctagaaatagcaagttaaaataaggctagtccgttatcaacttgaaaaagtggcaccgagtcggtgcgcttcttttttgcactcacactggccagagtgaggattgcagatttt

SEQ ID NO: 6797 - RNA, 143 nt, synthetic construct
  source 1..143: mol_type = other RNA; note = pegRNA
aattctgcaatcctcactctgttttagagctagaaatagcaagttaaaataaggctagtccgttatcaacttgaaaaagtggcaccgagtcggtgcggcttcttttttgcactcacactgaccagagtgaggattgcagtttt

SEQ ID NO: 6798 - RNA, 143 nt, synthetic construct
  source 1..143: mol_type = other RNA; note = pegRNA
aattctgcaatcctcactctgttttagagctagaaatagcaagttaaaataaggctagtccgttatcaacttgaaaaagtggcaccgagtcggtgcggcttcttttttgcactcacactggccagagtgaggattgcagtttt

SEQ ID NO: 6799 - RNA, 143 nt, synthetic construct
  source 1..143: mol_type = other RNA; note = pegRNA
aattctgcaatcctcactctgttttagagctagaaatagcaagttaaaataaggctagtccgttatcaacttgaaaaagtggcaccgagtcggtgcgtcctttggcttcttttttgcactcacactgaccagagtgaggattg

SEQ ID NO: 6800 - RNA, 143 nt, synthetic construct
  source 1..143: mol_type = other RNA; note = pegRNA
aattctgcaatcctcactctgttttagagctagaaatagcaagttaaaataaggctagtccgttatcaacttgaaaaagtggcaccgagtcggtgcgtcctttggcttcttttttgcactcacactggccagagtgaggattg

SEQ ID NO: 6801 - RNA, 143 nt, synthetic construct
  source 1..143: mol_type = other RNA; note = pegRNA
aattctgcaatcctcactctgttttagagctagaaatagcaagttaaaataaggctagtccgttatcaacttgaaaaagtggcaccgagtcggtgctcctttggcttcttttttgcactcacactgaccagagtgaggattgc

SEQ ID NO: 6802 - RNA, 143 nt, synthetic construct
  source 1..143: mol_type = other RNA; note = pegRNA
aattctgcaatcctcactctgttttagagctagaaatagcaagttaaaataaggctagtccgttatcaacttgaaaaagtggcaccgagtcggtgctcctttggcttcttttttgcactcacactggccagagtgaggattgc

SEQ ID NO: 6803 - RNA, 143 nt, synthetic construct
  source 1..143: mol_type = other RNA; note = pegRNA
aattctgcaatcctcactctgttttagagctagaaatagcaagttaaaataaggctagtccgttatcaacttgaaaaagtggcaccgagtcggtgctggcttcttttttgcactcacactgaccagagtgaggattgcagaat

SEQ ID NO: 6804 - RNA, 143 nt, synthetic construct
  source 1..143: mol_type = other RNA; note = pegRNA
aattctgcaatcctcactctgttttagagctagaaatagcaagttaaaataaggctagtccgttatcaacttgaaaaagtggcaccgagtcggtgctggcttcttttttgcactcacactgaccagagtgaggattgcatttt

SEQ ID NO: 6805 - RNA, 143 nt, synthetic construct
  source 1..143: mol_type = other RNA; note = pegRNA
aattctgcaatcctcactctgttttagagctagaaatagcaagttaaaataaggctagtccgttatcaacttgaaaaagtggcaccgagtcggtgctggcttcttttttgcactcacactggccagagtgaggattgcagaat

SEQ ID NO: 6806 - RNA, 143 nt, synthetic construct
  source 1..143: mol_type = other RNA; note = pegRNA
aattctgcaatcctcactctgttttagagctagaaatagcaagttaaaataaggctagtccgttatcaacttgaaaaagtggcaccgagtcggtgctggcttcttttttgcactcacactggccagagtgaggattgcatttt

SEQ ID NO: 6807 - RNA, 143 nt, synthetic construct
  source 1..143: mol_type = other RNA; note = pegRNA
aattctgcaatcctcactctgttttagagctagaaatagcaagttaaaataaggctagtccgttatcaacttgaaaaagtggcaccgagtcggtgcttcttttttgcactcacactgaccagagtgaggattgcagaattttt

SEQ ID NO: 6808 - RNA, 143 nt, synthetic construct
  source 1..143: mol_type = other RNA; note = pegRNA
aattctgcaatcctcactctgttttagagctagaaatagcaagttaaaataaggctagtccgttatcaacttgaaaaagtggcaccgagtcggtgcttcttttttgcactcacactggccagagtgaggattgcagaattttt

SEQ ID NO: 6809 - RNA, 143 nt, synthetic construct
  source 1..143: mol_type = other RNA; note = pegRNA
aattctgcaatcctcactctgttttagagctagaaatagcaagttaaaataaggctagtccgttatcaacttgaaaaagtggcaccgagtcggtgcttggcttcttttttgcactcacactgaccagagtgaggattgcagaa

SEQ ID NO: 6810 - RNA, 143 nt, synthetic construct
  source 1..143: mol_type = other RNA; note = pegRNA
aattctgcaatcctcactctgttttagagctagaaatagcaagttaaaataaggctagtccgttatcaacttgaaaaagtggcaccgagtcggtgcttggcttcttttttgcactcacactgaccagagtgaggattgctttt

SEQ ID NO: 6811 - RNA, 143 nt, synthetic construct
  source 1..143: mol_type = other RNA; note = pegRNA
aattctgcaatcctcactctgttttagagctagaaatagcaagttaaaataaggctagtccgttatcaacttgaaaaagtggcaccgagtcggtgcttggcttcttttttgcactcacactggccagagtgaggattgcagaa

SEQ ID NO: 6812 - RNA, 143 nt, synthetic construct
  source 1..143: mol_type = other RNA; note = pegRNA
aattctgcaatcctcactctgttttagagctagaaatagcaagttaaaataaggctagtccgttatcaacttgaaaaagtggcaccgagtcggtgcttggcttcttttttgcactcacactggccagagtgaggattgctttt

SEQ ID NO: 6813 - RNA, 143 nt, synthetic construct
  source 1..143: mol_type = other RNA; note = pegRNA
aattctgcaatcctcactctgttttagagctagaaatagcaagttaaaataaggctagtccgttatcaacttgaaaaagtggcaccgagtcggtgctttggcttcttttttgcactcacactgaccagagtgaggattgcaga

SEQ ID NO: 6814 - RNA, 143 nt, synthetic construct
  source 1..143: mol_type = other RNA; note = pegRNA
aattctgcaatcctcactctgttttagagctagaaatagcaagttaaaataaggctagtccgttatcaacttgaaaaagtggcaccgagtcggtgctttggcttcttttttgcactcacactgaccagagtgaggattgtttt

SEQ ID NO: 6815 - RNA, 143 nt, synthetic construct
  source 1..143: mol_type = other RNA; note = pegRNA
aattctgcaatcctcactctgttttagagctagaaatagcaagttaaaataaggctagtccgttatcaacttgaaaaagtggcaccgagtcggtgctttggcttcttttttgcactcacactggccagagtgaggattgcaga

SEQ ID NO: 6816 - RNA, 143 nt, synthetic construct
  source 1..143: mol_type = other RNA; note = pegRNA
aattctgcaatcctcactctgttttagagctagaaatagcaagttaaaataaggctagtccgttatcaacttgaaaaagtggcaccgagtcggtgctttggcttcttttttgcactcacactggccagagtgaggattgtttt

SEQ ID NO: 6817 - RNA, 144 nt, synthetic construct
  source 1..144: mol_type = other RNA; note = pegRNA
aattctgcaatcctcactctgttttagagctagaaatagcaagttaaaataaggctagtccgttatcaacttgaaaaagtggcaccgagtcggtgcaagtcctttggcttcttttttgcactcacactgaccagagtgaggatt

SEQ ID NO: 6818 - RNA, 144 nt, synthetic construct
  source 1..144: mol_type = other RNA; note = pegRNA
aattctgcaatcctcactctgttttagagctagaaatagcaagttaaaataaggctagtccgttatcaacttgaaaaagtggcaccgagtcggtgcaagtcctttggcttcttttttgcactcacactggccagagtgaggatt

SEQ ID NO: 6819 - RNA, 144 nt, synthetic construct
  source 1..144: mol_type = other RNA; note = pegRNA
aattctgcaatcctcactctgttttagagctagaaatagcaagttaaaataaggctagtccgttatcaacttgaaaaagtggcaccgagtcggtgcagtcctttggcttcttttttgcactcacactgaccagagtgaggattg

SEQ ID NO: 6820 - RNA, 144 nt, synthetic construct
  source 1..144: mol_type = other RNA; note = pegRNA
aattctgcaatcctcactctgttttagagctagaaatagcaagttaaaataaggctagtccgttatcaacttgaaaaagtggcaccgagtcggtgcagtcctttggcttcttttttgcactcacactggccagagtgaggattg

SEQ ID NO: 6821 - RNA, 144 nt, synthetic construct
  source 1..144: mol_type = other RNA; note = pegRNA
aattctgcaatcctcactctgttttagagctagaaatagcaagttaaaataaggctagtccgttatcaacttgaaaaagtggcaccgagtcggtgccctttggcttcttttttgcactcacactgaccagagtgaggattgcag

SEQ ID NO: 6822 - RNA, 144 nt, synthetic construct
  source 1..144: mol_type = other RNA; note = pegRNA
aattctgcaatcctcactctgttttagagctagaaatagcaagttaaaataaggctagtccgttatcaacttgaaaaagtggcaccgagtcggtgccctttggcttcttttttgcactcacactgaccagagtgaggatttttt

SEQ ID NO: 6823 - RNA, 144 nt, synthetic construct
  source 1..144: mol_type = other RNA; note = pegRNA
aattctgcaatcctcactctgttttagagctagaaatagcaagttaaaataaggctagtccgttatcaacttgaaaaagtggcaccgagtcggtgccctttggcttcttttttgcactcacactggccagagtgaggattgcag

SEQ ID NO: 6824 - RNA, 144 nt, synthetic construct
  source 1..144: mol_type = other RNA; note = pegRNA
aattctgcaatcctcactctgttttagagctagaaatagcaagttaaaataaggctagtccgttatcaacttgaaaaagtggcaccgagtcggtgccctttggcttcttttttgcactcacactggccagagtgaggatttttt

SEQ ID NO: 6825 - RNA, 144 nt, synthetic construct
  source 1..144: mol_type = other RNA; note = pegRNA
aattctgcaatcctcactctgttttagagctagaaatagcaagttaaaataaggctagtccgttatcaacttgaaaaagtggcaccgagtcggtgccttcttttttgcactcacactgaccagagtgaggattgcagaattttt

SEQ ID NO: 6826 - RNA, 144 nt, synthetic construct
  source 1..144: mol_type = other RNA; note = pegRNA
aattctgcaatcctcactctgttttagagctagaaatagcaagttaaaataaggctagtccgttatcaacttgaaaaagtggcaccgagtcggtgccttcttttttgcactcacactggccagagtgaggattgcagaattttt

SEQ ID NO: 6827 - RNA, 144 nt, synthetic construct
  source 1..144: mol_type = other RNA; note = pegRNA
aattctgcaatcctcactctgttttagagctagaaatagcaagttaaaataaggctagtccgttatcaacttgaaaaagtggcaccgagtcggtgcctttggcttcttttttgcactcacactgaccagagtgaggattgcaga

SEQ ID NO: 6828 - RNA, 144 nt, synthetic construct
  source 1..144: mol_type = other RNA; note = pegRNA
aattctgcaatcctcactctgttttagagctagaaatagcaagttaaaataaggctagtccgttatcaacttgaaaaagtggcaccgagtcggtgcctttggcttcttttttgcactcacactgaccagagtgaggattgtttt

SEQ ID NO: 6829 - RNA, 144 nt, synthetic construct
  source 1..144: mol_type = other RNA; note = pegRNA
aattctgcaatcctcactctgttttagagctagaaatagcaagttaaaataaggctagtccgttatcaacttgaaaaagtggcaccgagtcggtgcctttggcttcttttttgcactcacactggccagagtgaggattgcaga

SEQ ID NO: 6830 - RNA, 144 nt, synthetic construct
  source 1..144: mol_type = other RNA; note = pegRNA
aattctgcaatcctcactctgttttagagctagaaatagcaagttaaaataaggctagtccgttatcaacttgaaaaagtggcaccgagtcggtgcctttggcttcttttttgcactcacactggccagagtgaggattgtttt

SEQ ID NO: 6831 - RNA, 144 nt, synthetic construct
  source 1..144: mol_type = other RNA; note = pegRNA
aattctgcaatcctcactctgttttagagctagaaatagcaagttaaaataaggctagtccgttatcaacttgaaaaagtggcaccgagtcggtgcgaagtcctttggcttcttttttgcactcacactgaccagagtgaggat

SEQ ID NO: 6832 - RNA, 144 nt, synthetic construct
  source 1..144: mol_type = other RNA; note = pegRNA
aattctgcaatcctcactctgttttagagctagaaatagcaagttaaaataaggctagtccgttatcaacttgaaaaagtggcaccgagtcggtgcgaagtcctttggcttcttttttgcactcacactggccagagtgaggat

SEQ ID NO: 6833 - RNA, 144 nt, synthetic construct
  source 1..144: mol_type = other RNA; note = pegRNA
aattctgcaatcctcactctgttttagagctagaaatagcaagttaaaataaggctagtccgttatcaacttgaaaaagtggcaccgagtcggtgcgcttcttttttgcactcacactgaccagagtgaggattgcagaatttt

SEQ ID NO: 6834 - RNA, 144 nt, synthetic construct
  source 1..144: mol_type = other RNA; note = pegRNA
aattctgcaatcctcactctgttttagagctagaaatagcaagttaaaataaggctagtccgttatcaacttgaaaaagtggcaccgagtcggtgcgcttcttttttgcactcacactggccagagtgaggattgcagaatttt

SEQ ID NO: 6835 - RNA, 144 nt, synthetic construct
  source 1..144: mol_type = other RNA; note = pegRNA
aattctgcaatcctcactctgttttagagctagaaatagcaagttaaaataaggctagtccgttatcaacttgaaaaagtggcaccgagtcggtgcggcttcttttttgcactcacactgaccagagtgaggattgcagatttt

SEQ ID NO: 6836 - RNA, 144 nt, synthetic construct
  source 1..144: mol_type = other RNA; note = pegRNA
aattctgcaatcctcactctgttttagagctagaaatagcaagttaaaataaggctagtccgttatcaacttgaaaaagtggcaccgagtcggtgcggcttcttttttgcactcacactggccagagtgaggattgcagatttt

SEQ ID NO: 6837 - RNA, 144 nt, synthetic construct
  source 1..144: mol_type = other RNA; note = pegRNA
aattctgcaatcctcactctgttttagagctagaaatagcaagttaaaataaggctagtccgttatcaacttgaaaaagtggcaccgagtcggtgcgtcctttggcttcttttttgcactcacactgaccagagtgaggattgc

SEQ ID NO: 6838 - RNA, 144 nt, synthetic construct
  source 1..144: mol_type = other RNA; note = pegRNA
aattctgcaatcctcactctgttttagagctagaaatagcaagttaaaataaggctagtccgttatcaacttgaaaaagtggcaccgagtcggtgcgtcctttggcttcttttttgcactcacactggccagagtgaggattgc

SEQ ID NO: 6839 - RNA, 144 nt, synthetic construct
  source 1..144: mol_type = other RNA; note = pegRNA
aattctgcaatcctcactctgttttagagctagaaatagcaagttaaaataaggctagtccgttatcaacttgaaaaagtggcaccgagtcggtgctcctttggcttcttttttgcactcacactgaccagagtgaggattgca

SEQ ID NO: 6840 - RNA, 144 nt, synthetic construct
  source 1..144: mol_type = other RNA; note = pegRNA
aattctgcaatcctcactctgttttagagctagaaatagcaagttaaaataaggctagtccgttatcaacttgaaaaagtggcaccgagtcggtgctcctttggcttcttttttgcactcacactgaccagagtgaggattttt

SEQ ID NO: 6841 - RNA, 144 nt, synthetic construct
  source 1..144: mol_type = other RNA; note = pegRNA
aattctgcaatcctcactctgttttagagctagaaatagcaagttaaaataaggctagtccgttatcaacttgaaaaagtggcaccgagtcggtgctcctttggcttcttttttgcactcacactggccagagtgaggattgca

SEQ ID NO: 6842 - RNA, 144 nt, synthetic construct
  source 1..144: mol_type = other RNA; note = pegRNA
aattctgcaatcctcactctgttttagagctagaaatagcaagttaaaataaggctagtccgttatcaacttgaaaaagtggcaccgagtcggtgctcctttggcttcttttttgcactcacactggccagagtgaggattttt

SEQ ID NO: 6843 - RNA, 144 nt, synthetic construct
  source 1..144: mol_type = other RNA; note = pegRNA
aattctgcaatcctcactctgttttagagctagaaatagcaagttaaaataaggctagtccgttatcaacttgaaaaagtggcaccgagtcggtgctggcttcttttttgcactcacactgaccagagtgaggattgcagtttt

SEQ ID NO: 6844 - RNA, 144 nt, synthetic construct
  source 1..144: mol_type = other RNA; note = pegRNA
aattctgcaatcctcactctgttttagagctagaaatagcaagttaaaataaggctagtccgttatcaacttgaaaaagtggcaccgagtcggtgctggcttcttttttgcactcacactggccagagtgaggattgcagtttt

SEQ ID NO: 6845 - RNA, 144 nt, synthetic construct
  source 1..144: mol_type = other RNA; note = pegRNA
aattctgcaatcctcactctgttttagagctagaaatagcaagttaaaataaggctagtccgttatcaacttgaaaaagtggcaccgagtcggtgcttggcttcttttttgcactcacactgaccagagtgaggattgcagaat

SEQ ID NO: 6846 - RNA, 144 nt, synthetic construct
  source 1..144: mol_type = other RNA; note = pegRNA
aattctgcaatcctcactctgttttagagctagaaatagcaagttaaaataaggctagtccgttatcaacttgaaaaagtggcaccgagtcggtgcttggcttcttttttgcactcacactgaccagagtgaggattgcatttt

SEQ ID NO: 6847 - RNA, 144 nt, synthetic construct
  source 1..144: mol_type = other RNA; note = pegRNA
aattctgcaatcctcactctgttttagagctagaaatagcaagttaaaataaggctagtccgttatcaacttgaaaaagtggcaccgagtcggtgcttggcttcttttttgcactcacactggccagagtgaggattgcagaat

SEQ ID NO: 6848 - RNA, 144 nt, synthetic construct
  source 1..144: mol_type = other RNA; note = pegRNA
aattctgcaatcctcactctgttttagagctagaaatagcaagttaaaataaggctagtccgttatcaacttgaaaaagtggcaccgagtcggtgcttggcttcttttttgcactcacactggccagagtgaggattgcatttt

SEQ ID NO: 6849 - RNA, 144 nt, synthetic construct
  source 1..144: mol_type = other RNA; note = pegRNA
aattctgcaatcctcactctgttttagagctagaaatagcaagttaaaataaggctagtccgttatcaacttgaaaaagtggcaccgagtcggtgctttggcttcttttttgcactcacactgaccagagtgaggattgcagaa

SEQ ID NO: 6850 - RNA, 144 nt, synthetic construct
  source 1..144: mol_type = other RNA; note = pegRNA
aattctgcaatcctcactctgttttagagctagaaatagcaagttaaaataaggctagtccgttatcaacttgaaaaagtggcaccgagtcggtgctttggcttcttttttgcactcacactgaccagagtgaggattgctttt

SEQ ID NO: 6851 - RNA, 144 nt, synthetic construct
  source 1..144: mol_type = other RNA; note = pegRNA
aattctgcaatcctcactctgttttagagctagaaatagcaagttaaaataaggctagtccgttatcaacttgaaaaagtggcaccgagtcggtgctttggcttcttttttgcactcacactggccagagtgaggattgcagaa

SEQ ID NO: 6852 - RNA, 144 nt, synthetic construct
  source 1..144: mol_type = other RNA; note = pegRNA
aattctgcaatcctcactctgttttagagctagaaatagcaagttaaaataaggctagtccgttatcaacttgaaaaagtggcaccgagtcggtgctttggcttcttttttgcactcacactggccagagtgaggattgctttt

SEQ ID NO: 6853 - RNA, 145 nt, synthetic construct
  source 1..145: mol_type = other RNA; note = pegRNA
aattctgcaatcctcactctgttttagagctagaaatagcaagttaaaataaggctagtccgttatcaacttgaaaaagtggcaccgagtcggtgcaagtcctttggcttcttttttgcactcacactgaccagagtgaggattg

SEQ ID NO: 6854 - RNA, 145 nt, synthetic construct
  source 1..145: mol_type = other RNA; note = pegRNA
aattctgcaatcctcactctgttttagagctagaaatagcaagttaaaataaggctagtccgttatcaacttgaaaaagtggcaccgagtcggtgcaagtcctttggcttcttttttgcactcacactggccagagtgaggattg

SEQ ID NO: 6855 - RNA, 145 nt, synthetic construct
  source 1..145: mol_type = other RNA; note = pegRNA
aattctgcaatcctcactctgttttagagctagaaatagcaagttaaaataaggctagtccgttatcaacttgaaaaagtggcaccgagtcggtgcagtcctttggcttcttttttgcactcacactgaccagagtgaggattgc

SEQ ID NO: 6856 - RNA, 145 nt, synthetic construct
  source 1..145: mol_type = other RNA; note = pegRNA
aattctgcaatcctcactctgttttagagctagaaatagcaagttaaaataaggctagtccgttatcaacttgaaaaagtggcaccgagtcggtgcagtcctttggcttcttttttgcactcacactggccagagtgaggattgc

SEQ ID NO: 6857 - RNA, 145 nt, synthetic construct
  source 1..145: mol_type = other RNA; note = pegRNA
aattctgcaatcctcactctgttttagagctagaaatagcaagttaaaataaggctagtccgttatcaacttgaaaaagtggcaccgagtcggtgccctttggcttcttttttgcactcacactgaccagagtgaggattgcaga

SEQ ID NO: 6858 - RNA, 145 nt, synthetic construct
  source 1..145: mol_type = other RNA; note = pegRNA
aattctgcaatcctcactctgttttagagctagaaatagcaagttaaaataaggctagtccgttatcaacttgaaaaagtggcaccgagtcggtgccctttggcttcttttttgcactcacactgaccagagtgaggattgtttt

SEQ ID NO: 6859 - RNA, 145 nt, synthetic construct
  source 1..145: mol_type = other RNA; note = pegRNA
aattctgcaatcctcactctgttttagagctagaaatagcaagttaaaataaggctagtccgttatcaacttgaaaaagtggcaccgagtcggtgccctttggcttcttttttgcactcacactggccagagtgaggattgcaga

SEQ ID NO: 6860 - RNA, 145 nt, synthetic construct
  source 1..145: mol_type = other RNA; note = pegRNA
aattctgcaatcctcactctgttttagagctagaaatagcaagttaaaataaggctagtccgttatcaacttgaaaaagtggcaccgagtcggtgccctttggcttcttttttgcactcacactggccagagtgaggattgtttt

SEQ ID NO: 6861 - RNA, 145 nt, synthetic construct
  source 1..145: mol_type = other RNA; note = pegRNA
aattctgcaatcctcactctgttttagagctagaaatagcaagttaaaataaggctagtccgttatcaacttgaaaaagtggcaccgagtcggtgcctttggcttcttttttgcactcacactgaccagagtgaggattgcagaa

SEQ ID NO: 6862 - RNA, 145 nt, synthetic construct
  source 1..145: mol_type = other RNA; note = pegRNA
aattctgcaatcctcactctgttttagagctagaaatagcaagttaaaataaggctagtccgttatcaacttgaaaaagtggcaccgagtcggtgcctttggcttcttttttgcactcacactgaccagagtgaggattgctttt

SEQ ID NO: 6863 - RNA, 145 nt, synthetic construct
  source 1..145: mol_type = other RNA; note = pegRNA
aattctgcaatcctcactctgttttagagctagaaatagcaagttaaaataaggctagtccgttatcaacttgaaaaagtggcaccgagtcggtgcctttggcttcttttttgcactcacactggccagagtgaggattgcagaa

SEQ ID NO: 6864 - RNA, 145 nt, synthetic construct
  source 1..145: mol_type = other RNA; note = pegRNA
aattctgcaatcctcactctgttttagagctagaaatagcaagttaaaataaggctagtccgttatcaacttgaaaaagtggcaccgagtcggtgcctttggcttcttttttgcactcacactggccagagtgaggattgctttt

SEQ ID NO: 6865 - RNA, 145 nt, synthetic construct
  source 1..145: mol_type = other RNA; note = pegRNA
aattctgcaatcctcactctgttttagagctagaaatagcaagttaaaataaggctagtccgttatcaacttgaaaaagtggcaccgagtcggtgcgaagtcctttggcttcttttttgcactcacactgaccagagtgaggatt

SEQ ID NO: 6866 - RNA, 145 nt, synthetic construct
  source 1..145: mol_type = other RNA; note = pegRNA
aattctgcaatcctcactctgttttagagctagaaatagcaagttaaaataaggctagtccgttatcaacttgaaaaagtggcaccgagtcggtgcgaagtcctttggcttcttttttgcactcacactggccagagtgaggatt

SEQ ID NO: 6867 - RNA, 145 nt, synthetic construct
  source 1..145: mol_type = other RNA; note = pegRNA
aattctgcaatcctcactctgttttagagctagaaatagcaagttaaaataaggctagtccgttatcaacttgaaaaagtggcaccgagtcggtgcgcttcttttttgcactcacactgaccagagtgaggattgcagaattttt

SEQ ID NO: 6868 - RNA, 145 nt, synthetic construct
  source 1..145: mol_type = other RNA; note = pegRNA
aattctgcaatcctcactctgttttagagctagaaatagcaagttaaaataaggctagtccgttatcaacttgaaaaagtggcaccgagtcggtgcgcttcttttttgcactcacactggccagagtgaggattgcagaattttt

SEQ ID NO: 6869 - RNA, 145 nt, synthetic construct
  source 1..145: mol_type = other RNA; note = pegRNA
aattctgcaatcctcactctgttttagagctagaaatagcaagttaaaataaggctagtccgttatcaacttgaaaaagtggcaccgagtcggtgcggcttcttttttgcactcacactgaccagagtgaggattgcagaatttt

SEQ ID NO: 6870 - RNA, 145 nt, synthetic construct
  source 1..145: mol_type = other RNA; note = pegRNA
aattctgcaatcctcactctgttttagagctagaaatagcaagttaaaataaggctagtccgttatcaacttgaaaaagtggcaccgagtcggtgcggcttcttttttgcactcacactggccagagtgaggattgcagaatttt

SEQ ID NO: 6871 - RNA, 145 nt, synthetic construct
  source 1..145: mol_type = other RNA; note = pegRNA
aattctgcaatcctcactctgttttagagctagaaatagcaagttaaaataaggctagtccgttatcaacttgaaaaagtggcaccgagtcggtgcgtcctttggcttcttttttgcactcacactgaccagagtgaggattgca

SEQ ID NO: 6872 - RNA, 145 nt, synthetic construct
  source 1..145: mol_type = other RNA; note = pegRNA
aattctgcaatcctcactctgttttagagctagaaatagcaagttaaaataaggctagtccgttatcaacttgaaaaagtggcaccgagtcggtgcgtcctttggcttcttttttgcactcacactgaccagagtgaggattttt

SEQ ID NO: 6873 - RNA, 145 nt, synthetic construct
  source 1..145: mol_type = other RNA; note = pegRNA
aattctgcaatcctcactctgttttagagctagaaatagcaagttaaaataaggctagtccgttatcaacttgaaaaagtggcaccgagtcggtgcgtcctttggcttcttttttgcactcacactggccagagtgaggattgca

SEQ ID NO: 6874 - RNA, 145 nt, synthetic construct
  source 1..145: mol_type = other RNA; note = pegRNA
aattctgcaatcctcactctgttttagagctagaaatagcaagttaaaataaggctagtccgttatcaacttgaaaaagtggcaccgagtcggtgcgtcctttggcttcttttttgcactcacactggccagagtgaggattttt

SEQ ID NO: 6875 - RNA, 145 nt, synthetic construct
  source 1..145: mol_type = other RNA; note = pegRNA
aattctgcaatcctcactctgttttagagctagaaatagcaagttaaaataaggctagtccgttatcaacttgaaaaagtggcaccgagtcggtgctcctttggcttcttttttgcactcacactgaccagagtgaggattgcag

SEQ ID NO: 6876 - RNA, 145 nt, synthetic construct
  source 1..145: mol_type = other RNA; note = pegRNA
aattctgcaatcctcactctgttttagagctagaaatagcaagttaaaataaggctagtccgttatcaacttgaaaaagtggcaccgagtcggtgctcctttggcttcttttttgcactcacactgaccagagtgaggatttttt

SEQ ID NO: 6877 - RNA, 145 nt, synthetic construct
  source 1..145: mol_type = other RNA; note = pegRNA
aattctgcaatcctcactctgttttagagctagaaatagcaagttaaaataaggctagtccgttatcaacttgaaaaagtggcaccgagtcggtgctcctttggcttcttttttgcactcacactggccagagtgaggattgcag

SEQ ID NO: 6878 - RNA, 145 nt, synthetic construct
  source 1..145: mol_type = other RNA; note = pegRNA
aattctgcaatcctcactctgttttagagctagaaatagcaagttaaaataaggctagtccgttatcaacttgaaaaagtggcaccgagtcggtgctcctttggcttcttttttgcactcacactggccagagtgaggatttttt

SEQ ID NO: 6879 - RNA, 145 nt, synthetic construct
  source 1..145: mol_type = other RNA; note = pegRNA
aattctgcaatcctcactctgttttagagctagaaatagcaagttaaaataaggctagtccgttatcaacttgaaaaagtggcaccgagtcggtgctggcttcttttttgcactcacactgaccagagtgaggattgcagatttt

SEQ ID NO: 6880 - RNA, 145 nt, synthetic construct
  source 1..145: mol_type = other RNA; note = pegRNA
aattctgcaatcctcactctgttttagagctagaaatagcaagttaaaataaggctagtccgttatcaacttgaaaaagtggcaccgagtcggtgctggcttcttttttgcactcacactggccagagtgaggattgcagatttt

SEQ ID NO: 6881 - RNA, 145 nt, synthetic construct
  source 1..145: mol_type = other RNA; note = pegRNA
aattctgcaatcctcactctgttttagagctagaaatagcaagttaaaataaggctagtccgttatcaacttgaaaaagtggcaccgagtcggtgcttggcttcttttttgcactcacactgaccagagtgaggattgcagtttt

SEQ ID NO: 6882 - RNA, 145 nt, synthetic construct
  source 1..145: mol_type = other RNA; note = pegRNA
aattctgcaatcctcactctgttttagagctagaaatagcaagttaaaataaggctagtccgttatcaacttgaaaaagtggcaccgagtcggtgcttggcttcttttttgcactcacactggccagagtgaggattgcagtttt

SEQ ID NO: 6883 - RNA, 145 nt, synthetic construct
  source 1..145: mol_type = other RNA; note = pegRNA
aattctgcaatcctcactctgttttagagctagaaatagcaagttaaaataaggctagtccgttatcaacttgaaaaagtggcaccgagtcggtgctttggcttcttttttgcactcacactgaccagagtgaggattgcagaat

SEQ ID NO: 6884 - RNA, 145 nt, synthetic construct
  source 1..145: mol_type = other RNA; note = pegRNA
aattctgcaatcctcactctgttttagagctagaaatagcaagttaaaataaggctagtccgttatcaacttgaaaaagtggcaccgagtcggtgctttggcttcttttttgcactcacactgaccagagtgaggattgcatttt

SEQ ID NO: 6885 - RNA, 145 nt, synthetic construct
  source 1..145: mol_type = other RNA; note = pegRNA
aattctgcaatcctcactctgttttagagctagaaatagcaagttaaaataaggctagtccgttatcaacttgaaaaagtggcaccgagtcggtgctttggcttcttttttgcactcacactggccagagtgaggattgcagaat

SEQ ID NO: 6886 - RNA, 145 nt, synthetic construct
  source 1..145: mol_type = other RNA; note = pegRNA
aattctgcaatcctcactctgttttagagctagaaatagcaagttaaaataaggctagtccgttatcaacttgaaaaagtggcaccgagtcggtgctttggcttcttttttgcactcacactggccagagtgaggattgcatttt

SEQ ID NO: 6887 - RNA, 146 nt, synthetic construct
  source 1..146: mol_type = other RNA; note = pegRNA
aattctgcaatcctcactctgttttagagctagaaatagcaagttaaaataaggctagtccgttatcaacttgaaaaagtggcaccgagtcggtgcaagtcctttggcttcttttttgcactcacactgaccagagtgaggattgc

SEQ ID NO: 6888 - RNA, 146 nt, synthetic construct
  source 1..146: mol_type = other RNA; note = pegRNA
aattctgcaatcctcactctgttttagagctagaaatagcaagttaaaataaggctagtccgttatcaacttgaaaaagtggcaccgagtcggtgcaagtcctttggcttcttttttgcactcacactggccagagtgaggattgc

SEQ ID NO: 6889 - RNA, 146 nt, synthetic construct
  source 1..146: mol_type = other RNA; note = pegRNA
aattctgcaatcctcactctgttttagagctagaaatagcaagttaaaataaggctagtccgttatcaacttgaaaaagtggcaccgagtcggtgcagtcctttggcttcttttttgcactcacactgaccagagtgaggattgca

SEQ ID NO: 6890 - RNA, 146 nt, synthetic construct
  source 1..146: mol_type = other RNA; note = pegRNA
aattctgcaatcctcactctgttttagagctagaaatagcaagttaaaataaggctagtccgttatcaacttgaaaaagtggcaccgagtcggtgcagtcctttggcttcttttttgcactcacactgaccagagtgaggattttt

SEQ ID NO: 6891 - RNA, 146 nt, synthetic construct
  source 1..146: mol_type = other RNA; note = pegRNA
aattctgcaatcctcactctgttttagagctagaaatagcaagttaaaataaggctagtccgttatcaacttgaaaaagtggcaccgagtcggtgcagtcctttggcttcttttttgcactcacactggccagagtgaggattgca

SEQ ID NO: 6892 - RNA, 146 nt, synthetic construct
  source 1..146: mol_type = other RNA; note = pegRNA
aattctgcaatcctcactctgttttagagctagaaatagcaagttaaaataaggctagtccgttatcaacttgaaaaagtggcaccgagtcggtgcagtcctttggcttcttttttgcactcacactggccagagtgaggattttt

SEQ ID NO: 6893 - RNA, 146 nt, synthetic construct
  source 1..146: mol_type = other RNA; note = pegRNA
aattctgcaatcctcactctgttttagagctagaaatagcaagttaaaataaggctagtccgttatcaacttgaaaaagtggcaccgagtcggtgccctttggcttcttttttgcactcacactgaccagagtgaggattgcagaa

SEQ ID NO: 6894 - RNA, 146 nt, synthetic construct
  source 1..146: mol_type = other RNA; note = pegRNA
aattctgcaatcctcactctgttttagagctagaaatagcaagttaaaataaggctagtccgttatcaacttgaaaaagtggcaccgagtcggtgccctttggcttcttttttgcactcacactgaccagagtgaggattgctttt

SEQ ID NO: 6895 - RNA, 146 nt, synthetic construct
  source 1..146: mol_type = other RNA; note = pegRNA
aattctgcaatcctcactctgttttagagctagaaatagcaagttaaaataaggctagtccgttatcaacttgaaaaagtggcaccgagtcggtgccctttggcttcttttttgcactcacactggccagagtgaggattgcagaa

SEQ ID NO: 6896 - RNA, 146 nt, synthetic construct
  source 1..146: mol_type = other RNA; note = pegRNA
aattctgcaatcctcactctgttttagagctagaaatagcaagttaaaataaggctagtccgttatcaacttgaaaaagtggcaccgagtcggtgccctttggcttcttttttgcactcacactggccagagtgaggattgctttt

SEQ ID NO: 6897 - RNA, 146 nt, synthetic construct
  source 1..146: mol_type = other RNA; note = pegRNA
aattctgcaatcctcactctgttttagagctagaaatagcaagttaaaataaggctagtccgttatcaacttgaaaaagtggcaccgagtcggtgcctttggcttcttttttgcactcacactgaccagagtgaggattgcagaat

SEQ ID NO: 6898 - RNA, 146 nt, synthetic construct
  source 1..146: mol_type = other RNA; note = pegRNA
aattctgcaatcctcactctgttttagagctagaaatagcaagttaaaataaggctagtccgttatcaacttgaaaaagtggcaccgagtcggtgcctttggcttcttttttgcactcacactgaccagagtgaggattgcatttt

SEQ ID NO: 6899 - RNA, 146 nt, synthetic construct
  source 1..146: mol_type = other RNA; note = pegRNA
aattctgcaatcctcactctgttttagagctagaaatagcaagttaaaataaggctagtccgttatcaacttgaaaaagtggcaccgagtcggtgcctttggcttcttttttgcactcacactggccagagtgaggattgcagaat

SEQ ID NO: 6900 - RNA, 146 nt, synthetic construct
  source 1..146: mol_type = other RNA; note = pegRNA
aattctgcaatcctcactctgttttagagctagaaatagcaagttaaaataaggctagtccgttatcaacttgaaaaagtggcaccgagtcggtgcctttggcttcttttttgcactcacactggccagagtgaggattgcatttt

SEQ ID NO: 6901 - RNA, 146 nt, synthetic construct
  source 1..146: mol_type = other RNA; note = pegRNA
aattctgcaatcctcactctgttttagagctagaaatagcaagttaaaataaggctagtccgttatcaacttgaaaaagtggcaccgagtcggtgcgaagtcctttggcttcttttttgcactcacactgaccagagtgaggattg

SEQ ID NO: 6902 - RNA, 146 nt, synthetic construct
  source 1..146: mol_type = other RNA; note = pegRNA
aattctgcaatcctcactctgttttagagctagaaatagcaagttaaaataaggctagtccgttatcaacttgaaaaagtggcaccgagtcggtgcgaagtcctttggcttcttttttgcactcacactggccagagtgaggattg

SEQ ID NO: 6903 - RNA, 146 nt, synthetic construct
  source 1..146: mol_type = other RNA; note = pegRNA
aattctgcaatcctcactctgttttagagctagaaatagcaagttaaaataaggctagtccgttatcaacttgaaaaagtggcaccgagtcggtgcggcttcttttttgcactcacactgaccagagtgaggattgcagaattttt

SEQ ID NO: 6904 - RNA, 146 nt, synthetic construct
  source 1..146: mol_type = other RNA; note = pegRNA
aattctgcaatcctcactctgttttagagctagaaatagcaagttaaaataaggctagtccgttatcaacttgaaaaagtggcaccgagtcggtgcggcttcttttttgcactcacactggccagagtgaggattgcagaattttt

SEQ ID NO: 6905 - RNA, 146 nt, synthetic construct
  source 1..146: mol_type = other RNA; note = pegRNA
aattctgcaatcctcactctgttttagagctagaaatagcaagttaaaataaggctagtccgttatcaacttgaaaaagtggcaccgagtcggtgcgtcctttggcttcttttttgcactcacactgaccagagtgaggattgcag

SEQ ID NO: 6906 - RNA, 146 nt, synthetic construct
  source 1..146: mol_type = other RNA; note = pegRNA
aattctgcaatcctcactctgttttagagctagaaatagcaagttaaaataaggctagtccgttatcaacttgaaaaagtggcaccgagtcggtgcgtcctttggcttcttttttgcactcacactgaccagagtgaggatttttt

SEQ ID NO: 6907 - RNA, 146 nt, synthetic construct
  source 1..146: mol_type = other RNA; note = pegRNA
aattctgcaatcctcactctgttttagagctagaaatagcaagttaaaataaggctagtccgttatcaacttgaaaaagtggcaccgagtcggtgcgtcctttggcttcttttttgcactcacactggccagagtgaggattgcag

SEQ ID NO: 6908 - RNA, 146 nt, synthetic construct
  source 1..146: mol_type = other RNA; note = pegRNA
aattctgcaatcctcactctgttttagagctagaaatagcaagttaaaataaggctagtccgttatcaacttgaaaaagtggcaccgagtcggtgcgtcctttggcttcttttttgcactcacactggccagagtgaggatttttt

SEQ ID NO: 6909 - RNA, 146 nt, synthetic construct
  source 1..146: mol_type = other RNA; note = pegRNA
aattctgcaatcctcactctgttttagagctagaaatagcaagttaaaataaggctagtccgttatcaacttgaaaaagtggcaccgagtcggtgctcctttggcttcttttttgcactcacactgaccagagtgaggattgcaga

SEQ ID NO: 6910 - RNA, 146 nt, synthetic construct
  source 1..146: mol_type = other RNA; note = pegRNA
aattctgcaatcctcactctgttttagagctagaaatagcaagttaaaataaggctagtccgttatcaacttgaaaaagtggcaccgagtcggtgctcctttggcttcttttttgcactcacactgaccagagtgaggattgtttt

SEQ ID NO: 6911 - RNA, 146 nt, synthetic construct
  source 1..146: mol_type = other RNA; note = pegRNA
aattctgcaatcctcactctgttttagagctagaaatagcaagttaaaataaggctagtccgttatcaacttgaaaaagtggcaccgagtcggtgctcctttggcttcttttttgcactcacactggccagagtgaggattgcaga

SEQ ID NO: 6912 - RNA, 146 nt, synthetic construct
  source 1..146: mol_type = other RNA; note = pegRNA
aattctgcaatcctcactctgttttagagctagaaatagcaagttaaaataaggctagtccgttatcaacttgaaaaagtggcaccgagtcggtgctcctttggcttcttttttgcactcacactggccagagtgaggattgtttt

SEQ ID NO: 6913 - RNA, 146 nt, synthetic construct
  source 1..146: mol_type = other RNA; note = pegRNA
aattctgcaatcctcactctgttttagagctagaaatagcaagttaaaataaggctagtccgttatcaacttgaaaaagtggcaccgagtcggtgctggcttcttttttgcactcacactgaccagagtgaggattgcagaatttt

SEQ ID NO: 6914 - RNA, 146 nt, synthetic construct
  source 1..146: mol_type = other RNA; note = pegRNA
aattctgcaatcctcactctgttttagagctagaaatagcaagttaaaataaggctagtccgttatcaacttgaaaaagtggcaccgagtcggtgctggcttcttttttgcactcacactggccagagtgaggattgcagaatttt

SEQ ID NO: 6915 - RNA, 146 nt, synthetic construct
  source 1..146: mol_type = other RNA; note = pegRNA
aattctgcaatcctcactctgttttagagctagaaatagcaagttaaaataaggctagtccgttatcaacttgaaaaagtggcaccgagtcggtgcttggcttcttttttgcactcacactgaccagagtgaggattgcagatttt

SEQ ID NO: 6916 - RNA, 146 nt, synthetic construct
  source 1..146: mol_type = other RNA; note = pegRNA
aattctgcaatcctcactctgttttagagctagaaatagcaagttaaaataaggctagtccgttatcaacttgaaaaagtggcaccgagtcggtgcttggcttcttttttgcactcacactggccagagtgaggattgcagatttt

SEQ ID NO: 6917 - RNA, 146 nt, synthetic construct
  source 1..146: mol_type = other RNA; note = pegRNA
aattctgcaatcctcactctgttttagagctagaaatagcaagttaaaataaggctagtccgttatcaacttgaaaaagtggcaccgagtcggtgctttggcttcttttttgcactcacactgaccagagtgaggattgcagtttt

SEQ ID NO: 6918 - RNA, 146 nt, synthetic construct
  source 1..146: mol_type = other RNA; note = pegRNA
aattctgcaatcctcactctgttttagagctagaaatagcaagttaaaataaggctagtccgttatcaacttgaaaaagtggcaccgagtcggtgctttggcttcttttttgcactcacactggccagagtgaggattgcagtttt

SEQ ID NO: 6919 - RNA, 147 nt, synthetic construct
  source 1..147: mol_type = other RNA; note = pegRNA
aattctgcaatcctcactctgttttagagctagaaatagcaagttaaaataaggctagtccgttatcaacttgaaaaagtggcaccgagtcggtgcaagtcctttggcttcttttttgcactcacactgaccagagtgaggattgca

SEQ ID NO: 6920 - RNA, 147 nt, synthetic construct
  source 1..147: mol_type = other RNA; note = pegRNA
aattctgcaatcctcactctgttttagagctagaaatagcaagttaaaataaggctagtccgttatcaacttgaaaaagtggcaccgagtcggtgcaagtcctttggcttcttttttgcactcacactgaccagagtgaggattttt

SEQ ID NO: 6921 - RNA, 147 nt, synthetic construct
  source 1..147: mol_type = other RNA; note = pegRNA
aattctgcaatcctcactctgttttagagctagaaatagcaagttaaaataaggctagtccgttatcaacttgaaaaagtggcaccgagtcggtgcaagtcctttggcttcttttttgcactcacactggccagagtgaggattgca

SEQ ID NO: 6922 - RNA, 147 nt, synthetic construct
  source 1..147: mol_type = other RNA; note = pegRNA
aattctgcaatcctcactctgttttagagctagaaatagcaagttaaaataaggctagtccgttatcaacttgaaaaagtggcaccgagtcggtgcaagtcctttggcttcttttttgcactcacactggccagagtgaggattttt

SEQ ID NO: 6923 - RNA, 147 nt, synthetic construct
  source 1..147: mol_type = other RNA; note = pegRNA
aattctgcaatcctcactctgttttagagctagaaatagcaagttaaaataaggctagtccgttatcaacttgaaaaagtggcaccgagtcggtgcagtcctttggcttcttttttgcactcacactgaccagagtgaggattgcag

SEQ ID NO: 6924 - RNA, 147 nt, synthetic construct
  source 1..147: mol_type = other RNA; note = pegRNA
aattctgcaatcctcactctgttttagagctagaaatagcaagttaaaataaggctagtccgttatcaacttgaaaaagtggcaccgagtcggtgcagtcctttggcttcttttttgcactcacactgaccagagtgaggatttttt

SEQ ID NO: 6925 - RNA, 147 nt, synthetic construct
  source 1..147: mol_type = other RNA; note = pegRNA
aattctgcaatcctcactctgttttagagctagaaatagcaagttaaaataaggctagtccgttatcaacttgaaaaagtggcaccgagtcggtgcagtcctttggcttcttttttgcactcacactggccagagtgaggattgcag

SEQ ID NO: 6926 - RNA, 147 nt, synthetic construct
  source 1..147: mol_type = other RNA; note = pegRNA
aattctgcaatcctcactctgttttagagctagaaatagcaagttaaaataaggctagtccgttatcaacttgaaaaagtggcaccgagtcggtgcagtcctttggcttcttttttgcactcacactggccagagtgaggatttttt

SEQ ID NO: 6927 - RNA, 147 nt, synthetic construct
  source 1..147: mol_type = other RNA; note = pegRNA
aattctgcaatcctcactctgttttagagctagaaatagcaagttaaaataaggctagtccgttatcaacttgaaaaagtggcaccgagtcggtgccctttggcttcttttttgcactcacactgaccagagtgaggattgcagaat

SEQ ID NO: 6928 - RNA, 147 nt, synthetic construct
  source 1..147: mol_type = other RNA; note = pegRNA
aattctgcaatcctcactctgttttagagctagaaatagcaagttaaaataaggctagtccgttatcaacttgaaaaagtggcaccgagtcggtgccctttggcttcttttttgcactcacactgaccagagtgaggattgcatttt

SEQ ID NO: 6929 - RNA, 147 nt, synthetic construct
  source 1..147: mol_type = other RNA; note = pegRNA
aattctgcaatcctcactctgttttagagctagaaatagcaagttaaaataaggctagtccgttatcaacttgaaaaagtggcaccgagtcggtgccctttggcttcttttttgcactcacactggccagagtgaggattgcagaat

SEQ ID NO: 6930 - RNA, 147 nt, synthetic construct
  source 1..147: mol_type = other RNA; note = pegRNA
aattctgcaatcctcactctgttttagagctagaaatagcaagttaaaataaggctagtccgttatcaacttgaaaaagtggcaccgagtcggtgccctttggcttcttttttgcactcacactggccagagtgaggattgcatttt

SEQ ID NO: 6931 - RNA, 147 nt, synthetic construct
  source 1..147: mol_type = other RNA; note = pegRNA
aattctgcaatcctcactctgttttagagctagaaatagcaagttaaaataaggctagtccgttatcaacttgaaaaagtggcaccgagtcggtgcctttggcttcttttttgcactcacactgaccagagtgaggattgcagtttt

SEQ ID NO: 6932 - RNA, 147 nt, synthetic construct
  source 1..147: mol_type = other RNA; note = pegRNA
aattctgcaatcctcactctgttttagagctagaaatagcaagttaaaataaggctagtccgttatcaacttgaaaaagtggcaccgagtcggtgcctttggcttcttttttgcactcacactggccagagtgaggattgcagtttt

SEQ ID NO: 6933 - RNA, 147 nt, synthetic construct
  source 1..147: mol_type = other RNA; note = pegRNA
aattctgcaatcctcactctgttttagagctagaaatagcaagttaaaataaggctagtccgttatcaacttgaaaaagtggcaccgagtcggtgcgaagtcctttggcttcttttttgcactcacactgaccagagtgaggattgc

SEQ ID NO: 6934 - RNA, 147 nt, synthetic construct
  source 1..147: mol_type = other RNA; note = pegRNA
aattctgcaatcctcactctgttttagagctagaaatagcaagttaaaataaggctagtccgttatcaacttgaaaaagtggcaccgagtcggtgcgaagtcctttggcttcttttttgcactcacactggccagagtgaggattgc

SEQ ID NO: 6935 - RNA, 147 nt, synthetic construct
  source 1..147: mol_type = other RNA; note = pegRNA
aattctgcaatcctcactctgttttagagctagaaatagcaagttaaaataaggctagtccgttatcaacttgaaaaagtggcaccgagtcggtgcgtcctttggcttcttttttgcactcacactgaccagagtgaggattgcaga

SEQ ID NO: 6936 - RNA, 147 nt, synthetic construct
  source 1..147: mol_type = other RNA; note = pegRNA
aattctgcaatcctcactctgttttagagctagaaatagcaagttaaaataaggctagtccgttatcaacttgaaaaagtggcaccgagtcggtgcgtcctttggcttcttttttgcactcacactgaccagagtgaggattgtttt

SEQ ID NO: 6937 - RNA, 147 nt, synthetic construct
  source 1..147: mol_type = other RNA; note = pegRNA
aattctgcaatcctcactctgttttagagctagaaatagcaagttaaaataaggctagtccgttatcaacttgaaaaagtggcaccgagtcggtgcgtcctttggcttcttttttgcactcacactggccagagtgaggattgcaga

SEQ ID NO: 6938 - RNA, 147 nt, synthetic construct
  source 1..147: mol_type = other RNA; note = pegRNA
aattctgcaatcctcactctgttttagagctagaaatagcaagttaaaataaggctagtccgttatcaacttgaaaaagtggcaccgagtcggtgcgtcctttggcttcttttttgcactcacactggccagagtgaggattgtttt

SEQ ID NO: 6939 - RNA, 147 nt, synthetic construct
  source 1..147: mol_type = other RNA; note = pegRNA
aattctgcaatcctcactctgttttagagctagaaatagcaagttaaaataaggctagtccgttatcaacttgaaaaagtggcaccgagtcggtgctcctttggcttcttttttgcactcacactgaccagagtgaggattgcagaa

SEQ ID NO: 6940 - RNA, 147 nt, synthetic construct
  source 1..147: mol_type = other RNA; note = pegRNA
aattctgcaatcctcactctgttttagagctagaaatagcaagttaaaataaggctagtccgttatcaacttgaaaaagtggcaccgagtcggtgctcctttggcttcttttttgcactcacactgaccagagtgaggattgctttt

SEQ ID NO: 6941 - RNA, 147 nt, synthetic construct
  source 1..147: mol_type = other RNA; note = pegRNA
aattctgcaatcctcactctgttttagagctagaaatagcaagttaaaataaggctagtccgttatcaacttgaaaaagtggcaccgagtcggtgctcctttggcttcttttttgcactcacactggccagagtgaggattgcagaa

SEQ ID NO: 6942 - RNA, 147 nt, synthetic construct
  source 1..147: mol_type = other RNA; note = pegRNA
aattctgcaatcctcactctgttttagagctagaaatagcaagttaaaataaggctagtccgttatcaacttgaaaaagtggcaccgagtcggtgctcctttggcttcttttttgcactcacactggccagagtgaggattgctttt

SEQ ID NO: 6943 - RNA, 147 nt, synthetic construct
  source 1..147: mol_type = other RNA; note = pegRNA
aattctgcaatcctcactctgttttagagctagaaatagcaagttaaaataaggctagtccgttatcaacttgaaaaagtggcaccgagtcggtgctggcttcttttttgcactcacactgaccagagtgaggattgcagaattttt

SEQ ID NO: 6944 - RNA, 147 nt, synthetic construct
  source 1..147: mol_type = other RNA; note = pegRNA
aattctgcaatcctcactctgttttagagctagaaatagcaagttaaaataaggctagtccgttatcaacttgaaaaagtggcaccgagtcggtgctggcttcttttttgcactcacactggccagagtgaggattgcagaattttt

SEQ ID NO: 6945 - RNA, 147 nt, synthetic construct
  source 1..147: mol_type = other RNA; note = pegRNA
aattctgcaatcctcactctgttttagagctagaaatagcaagttaaaataaggctagtccgttatcaacttgaaaaagtggcaccgagtcggtgcttggcttcttttttgcactcacactgaccagagtgaggattgcagaatttt

SEQ ID NO: 6946 - RNA, 147 nt, synthetic construct
  source 1..147: mol_type = other RNA; note = pegRNA
aattctgcaatcctcactctgttttagagctagaaatagcaagttaaaataaggctagtccgttatcaacttgaaaaagtggcaccgagtcggtgcttggcttcttttttgcactcacactggccagagtgaggattgcagaatttt

SEQ ID NO: 6947 - RNA, 147 nt, synthetic construct
  source 1..147: mol_type = other RNA; note = pegRNA
aattctgcaatcctcactctgttttagagctagaaatagcaagttaaaataaggctagtccgttatcaacttgaaaaagtggcaccgagtcggtgctttggcttcttttttgcactcacactgaccagagtgaggattgcagatttt

SEQ ID NO: 6948 - RNA, 147 nt, synthetic construct
  source 1..147: mol_type = other RNA; note = pegRNA
aattctgcaatcctcactctgttttagagctagaaatagcaagttaaaataaggctagtccgttatcaacttgaaaaagtggcaccgagtcggtgctttggcttcttttttgcactcacactggccagagtgaggattgcagatttt

SEQ ID NO: 6949 - RNA, 148 nt, synthetic construct
  source 1..148: mol_type = other RNA; note = pegRNA
aattctgcaatcctcactctgttttagagctagaaatagcaagttaaaataaggctagtccgttatcaacttgaaaaagtggcaccgagtcggtgcaagtcctttggcttcttttttgcactcacactgaccagagtgaggattgcag

SEQ ID NO: 6950 - RNA, 148 nt, synthetic construct
  source 1..148: mol_type = other RNA; note = pegRNA
aattctgcaatcctcactctgttttagagctagaaatagcaagttaaaataaggctagtccgttatcaacttgaaaaagtggcaccgagtcggtgcaagtcctttggcttcttttttgcactcacactgaccagagtgaggatttttt

SEQ ID NO: 6951 - RNA, 148 nt, synthetic construct
  source 1..148: mol_type = other RNA; note = pegRNA
aattctgcaatcctcactctgttttagagctagaaatagcaagttaaaataaggctagtccgttatcaacttgaaaaagtggcaccgagtcggtgcaagtcctttggcttcttttttgcactcacactggccagagtgaggattgcag

SEQ ID NO: 6952 - RNA, 148 nt, synthetic construct
  source 1..148: mol_type = other RNA; note = pegRNA
aattctgcaatcctcactctgttttagagctagaaatagcaagttaaaataaggctagtccgttatcaacttgaaaaagtggcaccgagtcggtgcaagtcctttggcttcttttttgcactcacactggccagagtgaggatttttt

SEQ ID NO: 6953 - RNA, 148 nt, synthetic construct
  source 1..148: mol_type = other RNA; note = pegRNA
aattctgcaatcctcactctgttttagagctagaaatagcaagttaaaataaggctagtccgttatcaacttgaaaaagtggcaccgagtcggtgcagtcctttggcttcttttttgcactcacactgaccagagtgaggattgcaga

SEQ ID NO: 6954 - RNA, 148 nt, synthetic construct
  source 1..148: mol_type = other RNA; note = pegRNA
aattctgcaatcctcactctgttttagagctagaaatagcaagttaaaataaggctagtccgttatcaacttgaaaaagtggcaccgagtcggtgcagtcctttggcttcttttttgcactcacactgaccagagtgaggattgtttt

SEQ ID NO: 6955 - RNA, 148 nt, synthetic construct
  source 1..148: mol_type = other RNA; note = pegRNA
aattctgcaatcctcactctgttttagagctagaaatagcaagttaaaataaggctagtccgttatcaacttgaaaaagtggcaccgagtcggtgcagtcctttggcttcttttttgcactcacactggccagagtgaggattgcaga

SEQ ID NO: 6956 - RNA, 148 nt, synthetic construct
  source 1..148: mol_type = other RNA; note = pegRNA
aattctgcaatcctcactctgttttagagctagaaatagcaagttaaaataaggctagtccgttatcaacttgaaaaagtggcaccgagtcggtgcagtcctttggcttcttttttgcactcacactggccagagtgaggattgtttt

SEQ ID NO: 6957 - RNA, 148 nt, synthetic construct
  source 1..148: mol_type = other RNA; note = pegRNA
aattctgcaatcctcactctgttttagagctagaaatagcaagttaaaataaggctagtccgttatcaacttgaaaaagtggcaccgagtcggtgccctttggcttcttttttgcactcacactgaccagagtgaggattgcagtttt

SEQ ID NO: 6958 - RNA, 148 nt, synthetic construct
  source 1..148: mol_type = other RNA; note = pegRNA
aattctgcaatcctcactctgttttagagctagaaatagcaagttaaaataaggctagtccgttatcaacttgaaaaagtggcaccgagtcggtgccctttggcttcttttttgcactcacactggccagagtgaggattgcagtttt

SEQ ID NO: 6959 - RNA, 148 nt, synthetic construct
  source 1..148: mol_type = other RNA; note = pegRNA
aattctgcaatcctcactctgttttagagctagaaatagcaagttaaaataaggctagtccgttatcaacttgaaaaagtggcaccgagtcggtgcctttggcttcttttttgcactcacactgaccagagtgaggattgcagatttt

SEQ ID NO: 6960 - RNA, 148 nt, synthetic construct
  source 1..148: mol_type = other RNA; note = pegRNA
aattctgcaatcctcactctgttttagagctagaaatagcaagttaaaataaggctagtccgttatcaacttgaaaaagtggcaccgagtcggtgcctttggcttcttttttgcactcacactggccagagtgaggattgcagatttt

SEQ ID NO: 6961 - RNA, 148 nt, synthetic construct
  source 1..148: mol_type = other RNA; note = pegRNA
aattctgcaatcctcactctgttttagagctagaaatagcaagttaaaataaggctagtccgttatcaacttgaaaaagtggcaccgagtcggtgcgaagtcctttggcttcttttttgcactcacactgaccagagtgaggattgca

SEQ ID NO: 6962 - RNA, 148 nt, synthetic construct
  source 1..148: mol_type = other RNA; note = pegRNA
aattctgcaatcctcactctgttttagagctagaaatagcaagttaaaataaggctagtccgttatcaacttgaaaaagtggcaccgagtcggtgcgaagtcctttggcttcttttttgcactcacactgaccagagtgaggattttt

SEQ ID NO: 6963 - RNA, 148 nt, synthetic construct
  source 1..148: mol_type = other RNA; note = pegRNA
aattctgcaatcctcactctgttttagagctagaaatagcaagttaaaataaggctagtccgttatcaacttgaaaaagtggcaccgagtcggtgcgaagtcctttggcttcttttttgcactcacactggccagagtgaggattgca

SEQ ID NO: 6964 - RNA, 148 nt, synthetic construct
  source 1..148: mol_type = other RNA; note = pegRNA
aattctgcaatcctcactctgttttagagctagaaatagcaagttaaaataaggctagtccgttatcaacttgaaaaagtggcaccgagtcggtgcgaagtcctttggcttcttttttgcactcacactggccagagtgaggattttt

SEQ ID NO: 6965 - RNA, 148 nt, synthetic construct
  source 1..148: mol_type = other RNA; note = pegRNA
aattctgcaatcctcactctgttttagagctagaaatagcaagttaaaataaggctagtccgttatcaacttgaaaaagtggcaccgagtcggtgcgtcctttggcttcttttttgcactcacactgaccagagtgaggattgcagaa

SEQ ID NO: 6966 - RNA, 148 nt, synthetic construct
  source 1..148: mol_type = other RNA; note = pegRNA
aattctgcaatcctcactctgttttagagctagaaatagcaagttaaaataaggctagtccgttatcaacttgaaaaagtggcaccgagtcggtgcgtcctttggcttcttttttgcactcacactgaccagagtgaggattgctttt

SEQ ID NO: 6967 - RNA, 148 nt, synthetic construct
  source 1..148: mol_type = other RNA; note = pegRNA
aattctgcaatcctcactctgttttagagctagaaatagcaagttaaaataaggctagtccgttatcaacttgaaaaagtggcaccgagtcggtgcgtcctttggcttcttttttgcactcacactggccagagtgaggattgcagaa

SEQ ID NO: 6968 - RNA, 148 nt, synthetic construct
  source 1..148: mol_type = other RNA; note = pegRNA
aattctgcaatcctcactctgttttagagctagaaatagcaagttaaaataaggctagtccgttatcaacttgaaaaagtggcaccgagtcggtgcgtcctttggcttcttttttgcactcacactggccagagtgaggattgctttt

SEQ ID NO: 6969 - RNA, 148 nt, synthetic construct
  source 1..148: mol_type = other RNA; note = pegRNA
aattctgcaatcctcactctgttttagagctagaaatagcaagttaaaataaggctagtccgttatcaacttgaaaaagtggcaccgagtcggtgctcctttggcttcttttttgcactcacactgaccagagtgaggattgcagaat

SEQ ID NO: 6970 - RNA, 148 nt, synthetic construct
  source 1..148: mol_type = other RNA; note = pegRNA
aattctgcaatcctcactctgttttagagctagaaatagcaagttaaaataaggctagtccgttatcaacttgaaaaagtggcaccgagtcggtgctcctttggcttcttttttgcactcacactgaccagagtgaggattgcatttt

SEQ ID NO: 6971 - RNA, 148 nt, synthetic construct
  source 1..148: mol_type = other RNA; note = pegRNA
aattctgcaatcctcactctgttttagagctagaaatagcaagttaaaataaggctagtccgttatcaacttgaaaaagtggcaccgagtcggtgctcctttggcttcttttttgcactcacactggccagagtgaggattgcagaat

SEQ ID NO: 6972 - RNA, 148 nt, synthetic construct
  source 1..148: mol_type = other RNA; note = pegRNA
aattctgcaatcctcactctgttttagagctagaaatagcaagttaaaataaggctagtccgttatcaacttgaaaaagtggcaccgagtcggtgctcctttggcttcttttttgcactcacactggccagagtgaggattgcatttt

SEQ ID NO: 6973 - RNA, 148 nt, synthetic construct
  source 1..148: mol_type = other RNA; note = pegRNA
aattctgcaatcctcactctgttttagagctagaaatagcaagttaaaataaggctagtccgttatcaacttgaaaaagtggcaccgagtcggtgcttggcttcttttttgcactcacactgaccagagtgaggattgcagaattttt

SEQ ID NO: 6974 - RNA, 148 nt, synthetic construct
  source 1..148: mol_type = other RNA; note = pegRNA
aattctgcaatcctcactctgttttagagctagaaatagcaagttaaaataaggctagtccgttatcaacttgaaaaagtggcaccgagtcggtgcttggcttcttttttgcactcacactggccagagtgaggattgcagaattttt

SEQ ID NO: 6975 - RNA, 148 nt, synthetic construct
  source 1..148: mol_type = other RNA; note = pegRNA
aattctgcaatcctcactctgttttagagctagaaatagcaagttaaaataaggctagtccgttatcaacttgaaaaagtggcaccgagtcggtgctttggcttcttttttgcactcacactgaccagagtgaggattgcagaatttt

SEQ ID NO: 6976 - RNA, 148 nt, synthetic construct
  source 1..148: mol_type = other RNA; note = pegRNA
aattctgcaatcctcactctgttttagagctagaaatagcaagttaaaataaggctagtccgttatcaacttgaaaaagtggcaccgagtcggtgctttggcttcttttttgcactcacactggccagagtgaggattgcagaatttt

SEQ ID NO: 6977 - RNA, 149 nt, synthetic construct
  source 1..149: mol_type = other RNA; note = pegRNA
aattctgcaatcctcactctgttttagagctagaaatagcaagttaaaataaggctagtccgttatcaacttgaaaaagtggcaccgagtcggtgcaagtcctttggcttcttttttgcactcacactgaccagagtgaggattgcaga

SEQ ID NO: 6978 - RNA, 149 nt, synthetic construct
  source 1..149: mol_type = other RNA; note = pegRNA
aattctgcaatcctcactctgttttagagctagaaatagcaagttaaaataaggctagtccgttatcaacttgaaaaagtggcaccgagtcggtgcaagtcctttggcttcttttttgcactcacactgaccagagtgaggattgtttt

SEQ ID NO: 6979 - RNA, 149 nt, synthetic construct
  source 1..149: mol_type = other RNA; note = pegRNA
aattctgcaatcctcactctgttttagagctagaaatagcaagttaaaataaggctagtccgttatcaacttgaaaaagtggcaccgagtcggtgcaagtcctttggcttcttttttgcactcacactggccagagtgaggattgcaga

SEQ ID NO: 6980 - RNA, 149 nt, synthetic construct
  source 1..149: mol_type = other RNA; note = pegRNA
aattctgcaatcctcactctgttttagagctagaaatagcaagttaaaataaggctagtccgttatcaacttgaaaaagtggcaccgagtcggtgcaagtcctttggcttcttttttgcactcacactggccagagtgaggattgtttt

SEQ ID NO: 6981 - RNA, 149 nt, synthetic construct
  source 1..149: mol_type = other RNA; note = pegRNA
aattctgcaatcctcactctgttttagagctagaaatagcaagttaaaataaggctagtccgttatcaacttgaaaaagtggcaccgagtcggtgcagtcctttggcttcttttttgcactcacactgaccagagtgaggattgcagaa

SEQ ID NO: 6982 - RNA, 149 nt, synthetic construct
  source 1..149: mol_type = other RNA; note = pegRNA
aattctgcaatcctcactctgttttagagctagaaatagcaagttaaaataaggctagtccgttatcaacttgaaaaagtggcaccgagtcggtgcagtcctttggcttcttttttgcactcacactgaccagagtgaggattgctttt

SEQ ID NO: 6983 - RNA, 149 nt, synthetic construct
  source 1..149: mol_type = other RNA; note = pegRNA
aattctgcaatcctcactctgttttagagctagaaatagcaagttaaaataaggctagtccgttatcaacttgaaaaagtggcaccgagtcggtgcagtcctttggcttcttttttgcactcacactggccagagtgaggattgcagaa

SEQ ID NO: 6984 - RNA, 149 nt, synthetic construct
  source 1..149: mol_type = other RNA; note = pegRNA
aattctgcaatcctcactctgttttagagctagaaatagcaagttaaaataaggctagtccgttatcaacttgaaaaagtggcaccgagtcggtgcagtcctttggcttcttttttgcactcacactggccagagtgaggattgctttt

SEQ ID NO: 6985 - RNA, 149 nt, synthetic construct
  source 1..149: mol_type = other RNA; note = pegRNA
aattctgcaatcctcactctgttttagagctagaaatagcaagttaaaataaggctagtccgttatcaacttgaaaaagtggcaccgagtcggtgccctttggcttcttttttgcactcacactgaccagagtgaggattgcagatttt

SEQ ID NO: 6986 - RNA, 149 nt, synthetic construct
  source 1..149: mol_type = other RNA; note = pegRNA
aattctgcaatcctcactctgttttagagctagaaatagcaagttaaaataaggctagtccgttatcaacttgaaaaagtggcaccgagtcggtgccctttggcttcttttttgcactcacactggccagagtgaggattgcagatttt

SEQ ID NO: 6987 - RNA, 149 nt, synthetic construct
  source 1..149: mol_type = other RNA; note = pegRNA
aattctgcaatcctcactctgttttagagctagaaatagcaagttaaaataaggctagtccgttatcaacttgaaaaagtggcaccgagtcggtgcctttggcttcttttttgcactcacactgaccagagtgaggattgcagaatttt

SEQ ID NO: 6988 - RNA, 149 nt, synthetic construct
  source 1..149: mol_type = other RNA; note = pegRNA
aattctgcaatcctcactctgttttagagctagaaatagcaagttaaaataaggctagtccgttatcaacttgaaaaagtggcaccgagtcggtgcctttggcttcttttttgcactcacactggccagagtgaggattgcagaatttt

SEQ ID NO: 6989 - RNA, 149 nt, synthetic construct
  source 1..149: mol_type = other RNA; note = pegRNA
aattctgcaatcctcactctgttttagagctagaaatagcaagttaaaataaggctagtccgttatcaacttgaaaaagtggcaccgagtcggtgcgaagtcctttggcttcttttttgcactcacactgaccagagtgaggattgcag

SEQ ID NO: 6990 - RNA, 149 nt, synthetic construct
  source 1..149: mol_type = other RNA; note = pegRNA
aattctgcaatcctcactctgttttagagctagaaatagcaagttaaaataaggctagtccgttatcaacttgaaaaagtggcaccgagtcggtgcgaagtcctttggcttcttttttgcactcacactgaccagagtgaggatttttt

SEQ ID NO: 6991 - RNA, 149 nt, synthetic construct
  source 1..149: mol_type = other RNA; note = pegRNA
aattctgcaatcctcactctgttttagagctagaaatagcaagttaaaataaggctagtccgttatcaacttgaaaaagtggcaccgagtcggtgcgaagtcctttggcttcttttttgcactcacactggccagagtgaggattgcag

SEQ ID NO: 6992 - RNA, 149 nt, synthetic construct
  source 1..149: mol_type = other RNA; note = pegRNA
aattctgcaatcctcactctgttttagagctagaaatagcaagttaaaataaggctagtccgttatcaacttgaaaaagtggcaccgagtcggtgcgaagtcctttggcttcttttttgcactcacactggccagagtgaggatttttt

SEQ ID NO: 6993 - RNA, 149 nt, synthetic construct
  source 1..149: mol_type = other RNA; note = pegRNA
aattctgcaatcctcactctgttttagagctagaaatagcaagttaaaataaggctagtccgttatcaacttgaaaaagtggcaccgagtcggtgcgtcctttggcttcttttttgcactcacactgaccagagtgaggattgcagaat

SEQ ID NO: 6994 - RNA, 149 nt, synthetic construct
  source 1..149: mol_type = other RNA; note = pegRNA
aattctgcaatcctcactctgttttagagctagaaatagcaagttaaaataaggctagtccgttatcaacttgaaaaagtggcaccgagtcggtgcgtcctttggcttcttttttgcactcacactgaccagagtgaggattgcatttt

SEQ ID NO: 6995 - RNA, 149 nt, synthetic construct
  source 1..149: mol_type = other RNA; note = pegRNA
aattctgcaatcctcactctgttttagagctagaaatagcaagttaaaataaggctagtccgttatcaacttgaaaaagtggcaccgagtcggtgcgtcctttggcttcttttttgcactcacactggccagagtgaggattgcagaat

SEQ ID NO: 6996 - RNA, 149 nt, synthetic construct
  source 1..149: mol_type = other RNA; note = pegRNA
aattctgcaatcctcactctgttttagagctagaaatagcaagttaaaataaggctagtccgttatcaacttgaaaaagtggcaccgagtcggtgcgtcctttggcttcttttttgcactcacactggccagagtgaggattgcatttt

SEQ ID NO: 6997 - RNA, 149 nt, synthetic construct
  source 1..149: mol_type = other RNA; note = pegRNA
aattctgcaatcctcactctgttttagagctagaaatagcaagttaaaataaggctagtccgttatcaacttgaaaaagtggcaccgagtcggtgctcctttggcttcttttttgcactcacactgaccagagtgaggattgcagtttt

SEQ ID NO: 6998 - RNA, 149 nt, synthetic construct
  source 1..149: mol_type = other RNA; note = pegRNA
aattctgcaatcctcactctgttttagagctagaaatagcaagttaaaataaggctagtccgttatcaacttgaaaaagtggcaccgagtcggtgctcctttggcttcttttttgcactcacactggccagagtgaggattgcagtttt

SEQ ID NO: 6999 - RNA, 149 nt, synthetic construct
  source 1..149: mol_type = other RNA; note = pegRNA
aattctgcaatcctcactctgttttagagctagaaatagcaagttaaaataaggctagtccgttatcaacttgaaaaagtggcaccgagtcggtgctttggcttcttttttgcactcacactgaccagagtgaggattgcagaattttt

SEQ ID NO: 7000 - RNA, 149 nt, synthetic construct
  source 1..149: mol_type = other RNA; note = pegRNA
aattctgcaatcctcactctgttttagagctagaaatagcaagttaaaataaggctagtccgttatcaacttgaaaaagtggcaccgagtcggtgctttggcttcttttttgcactcacactggccagagtgaggattgcagaattttt

SEQ ID NO: 7001 - RNA, 150 nt, synthetic construct
  source 1..150: mol_type = other RNA; note = pegRNA
aattctgcaatcctcactctgttttagagctagaaatagcaagttaaaataaggctagtccgttatcaacttgaaaaagtggcaccgagtcggtgcaagtcctttggcttcttttttgcactcacactgaccagagtgaggattgcagaa

SEQ ID NO: 7002 - RNA, 150 nt, synthetic construct
  source 1..150: mol_type = other RNA; note = pegRNA
aattctgcaatcctcactctgttttagagctagaaatagcaagttaaaataaggctagtccgttatcaacttgaaaaagtggcaccgagtcggtgcaagtcctttggcttcttttttgcactcacactgaccagagtgaggattgctttt

SEQ ID NO: 7003 - RNA, 150 nt, synthetic construct
  source 1..150: mol_type = other RNA; note = pegRNA
aattctgcaatcctcactctgttttagagctagaaatagcaagttaaaataaggctagtccgttatcaacttgaaaaagtggcaccgagtcggtgcaagtcctttggcttcttttttgcactcacactggccagagtgaggattgcagaa

SEQ ID NO: 7004 - RNA, 150 nt, synthetic construct
  source 1..150: mol_type = other RNA; note = pegRNA
aattctgcaatcctcactctgttttagagctagaaatagcaagttaaaataaggctagtccgttatcaacttgaaaaagtggcaccgagtcggtgcaagtcctttggcttcttttttgcactcacactggccagagtgaggattgctttt

SEQ ID NO: 7005 - RNA, 150 nt, synthetic construct
  source 1..150: mol_type = other RNA; note = pegRNA
aattctgcaatcctcactctgttttagagctagaaatagcaagttaaaataaggctagtccgttatcaacttgaaaaagtggcaccgagtcggtgcagtcctttggcttcttttttgcactcacactgaccagagtgaggattgcagaat

SEQ ID NO: 7006 - RNA, 150 nt, synthetic construct
  source 1..150: mol_type = other RNA; note = pegRNA
aattctgcaatcctcactctgttttagagctagaaatagcaagttaaaataaggctagtccgttatcaacttgaaaaagtggcaccgagtcggtgcagtcctttggcttcttttttgcactcacactgaccagagtgaggattgcatttt

SEQ ID NO: 7007 - RNA, 150 nt, synthetic construct
  source 1..150: mol_type = other RNA; note = pegRNA
aattctgcaatcctcactctgttttagagctagaaatagcaagttaaaataaggctagtccgttatcaacttgaaaaagtggcaccgagtcggtgcagtcctttggcttcttttttgcactcacactggccagagtgaggattgcagaat

SEQ ID NO: 7008 - RNA, 150 nt, synthetic construct
  source 1..150: mol_type = other RNA; note = pegRNA
aattctgcaatcctcactctgttttagagctagaaatagcaagttaaaataaggctagtccgttatcaacttgaaaaagtggcaccgagtcggtgcagtcctttggcttcttttttgcactcacactggccagagtgaggattgcatttt

SEQ ID NO: 7009 - RNA, 150 nt, synthetic construct
  source 1..150: mol_type = other RNA; note = pegRNA
aattctgcaatcctcactctgttttagagctagaaatagcaagttaaaataaggctagtccgttatcaacttgaaaaagtggcaccgagtcggtgccctttggcttcttttttgcactcacactgaccagagtgaggattgcagaatttt

SEQ ID NO: 7010 - RNA, 150 nt, synthetic construct
  source 1..150: mol_type = other RNA; note = pegRNA
aattctgcaatcctcactctgttttagagctagaaatagcaagttaaaataaggctagtccgttatcaacttgaaaaagtggcaccgagtcggtgccctttggcttcttttttgcactcacactggccagagtgaggattgcagaatttt

SEQ ID NO: 7011 - RNA, 150 nt, synthetic construct
  source 1..150: mol_type = other RNA; note = pegRNA
aattctgcaatcctcactctgttttagagctagaaatagcaagttaaaataaggctagtccgttatcaacttgaaaaagtggcaccgagtcggtgcctttggcttcttttttgcactcacactgaccagagtgaggattgcagaattttt

SEQ ID NO: 7012 - RNA, 150 nt, synthetic construct
  source 1..150: mol_type = other RNA; note = pegRNA
aattctgcaatcctcactctgttttagagctagaaatagcaagttaaaataaggctagtccgttatcaacttgaaaaagtggcaccgagtcggtgcctttggcttcttttttgcactcacactggccagagtgaggattgcagaattttt

SEQ ID NO: 7013 - RNA, 150 nt, synthetic construct
  source 1..150: mol_type = other RNA; note = pegRNA
aattctgcaatcctcactctgttttagagctagaaatagcaagttaaaataaggctagtccgttatcaacttgaaaaagtggcaccgagtcggtgcgaagtcctttggcttcttttttgcactcacactgaccagagtgaggattgcaga

SEQ ID NO: 7014 - RNA, 150 nt, synthetic construct
  source 1..150: mol_type = other RNA; note = pegRNA
aattctgcaatcctcactctgttttagagctagaaatagcaagttaaaataaggctagtccgttatcaacttgaaaaagtggcaccgagtcggtgcgaagtcctttggcttcttttttgcactcacactgaccagagtgaggattgtttt

SEQ ID NO: 7015 - RNA, 150 nt, synthetic construct
  source 1..150: mol_type = other RNA; note = pegRNA
aattctgcaatcctcactctgttttagagctagaaatagcaagttaaaataaggctagtccgttatcaacttgaaaaagtggcaccgagtcggtgcgaagtcctttggcttcttttttgcactcacactggccagagtgaggattgcaga

SEQ ID NO: 7016 - RNA, 150 nt, synthetic construct
  source 1..150: mol_type = other RNA; note = pegRNA
aattctgcaatcctcactctgttttagagctagaaatagcaagttaaaataaggctagtccgttatcaacttgaaaaagtggcaccgagtcggtgcgaagtcctttggcttcttttttgcactcacactggccagagtgaggattgtttt

SEQ ID NO: 7017 - RNA, 150 nt, synthetic construct
  source 1..150: mol_type = other RNA; note = pegRNA
aattctgcaatcctcactctgttttagagctagaaatagcaagttaaaataaggctagtccgttatcaacttgaaaaagtggcaccgagtcggtgcgtcctttggcttcttttttgcactcacactgaccagagtgaggattgcagtttt

SEQ ID NO: 7018 - RNA, 150 nt, synthetic construct
  source 1..150: mol_type = other RNA; note = pegRNA
aattctgcaatcctcactctgttttagagctagaaatagcaagttaaaataaggctagtccgttatcaacttgaaaaagtggcaccgagtcggtgcgtcctttggcttcttttttgcactcacactggccagagtgaggattgcagtttt

SEQ ID NO: 7019 - RNA, 150 nt, synthetic construct
  source 1..150: mol_type = other RNA; note = pegRNA
aattctgcaatcctcactctgttttagagctagaaatagcaagttaaaataaggctagtccgttatcaacttgaaaaagtggcaccgagtcggtgctcctttggcttcttttttgcactcacactgaccagagtgaggattgcagatttt

SEQ ID NO: 7020 - RNA, 150 nt, synthetic construct
  source 1..150: mol_type = other RNA; note = pegRNA
aattctgcaatcctcactctgttttagagctagaaatagcaagttaaaataaggctagtccgttatcaacttgaaaaagtggcaccgagtcggtgctcctttggcttcttttttgcactcacactggccagagtgaggattgcagatttt

SEQ ID NO: 7021 - RNA, 151 nt, synthetic construct
  source 1..151: mol_type = other RNA; note = pegRNA
aattctgcaatcctcactctgttttagagctagaaatagcaagttaaaataaggctagtccgttatcaacttgaaaaagtggcaccgagtcggtgcaagtcctttggcttcttttttgcactcacactgaccagagtgaggattgcagaat

SEQ ID NO: 7022 - RNA, 151 nt, synthetic construct
  source 1..151: mol_type = other RNA; note = pegRNA
aattctgcaatcctcactctgttttagagctagaaatagcaagttaaaataaggctagtccgttatcaacttgaaaaagtggcaccgagtcggtgcaagtcctttggcttcttttttgcactcacactgaccagagtgaggattgcatttt

SEQ ID NO: 7023 - RNA, 151 nt, synthetic construct
  source 1..151: mol_type = other RNA; note = pegRNA
aattctgcaatcctcactctgttttagagctagaaatagcaagttaaaataaggctagtccgttatcaacttgaaaaagtggcaccgagtcggtgcaagtcctttggcttcttttttgcactcacactggccagagtgaggattgcagaat

SEQ ID NO: 7024 - RNA, 151 nt, synthetic construct
  source 1..151: mol_type = other RNA; note = pegRNA
aattctgcaatcctcactctgttttagagctagaaatagcaagttaaaataaggctagtccgttatcaacttgaaaaagtggcaccgagtcggtgcaagtcctttggcttcttttttgcactcacactggccagagtgaggattgcatttt

SEQ ID NO: 7025 - RNA, 151 nt, synthetic construct
  source 1..151: mol_type = other RNA; note = pegRNA
aattctgcaatcctcactctgttttagagctagaaatagcaagttaaaataaggctagtccgttatcaacttgaaaaagtggcaccgagtcggtgcagtcctttggcttcttttttgcactcacactgaccagagtgaggattgcagtttt

SEQ ID NO: 7026 - RNA, 151 nt, synthetic construct
  source 1..151: mol_type = other RNA; note = pegRNA
aattctgcaatcctcactctgttttagagctagaaatagcaagttaaaataaggctagtccgttatcaacttgaaaaagtggcaccgagtcggtgcagtcctttggcttcttttttgcactcacactggccagagtgaggattgcagtttt

SEQ ID NO: 7027 - RNA, 151 nt, synthetic construct
  source 1..151: mol_type = other RNA; note = pegRNA
aattctgcaatcctcactctgttttagagctagaaatagcaagttaaaataaggctagtccgttatcaacttgaaaaagtggcaccgagtcggtgccctttggcttcttttttgcactcacactgaccagagtgaggattgcagaattttt

SEQ ID NO: 7028 - RNA, 151 nt, synthetic construct
  source 1..151: mol_type = other RNA; note = pegRNA
aattctgcaatcctcactctgttttagagctagaaatagcaagttaaaataaggctagtccgttatcaacttgaaaaagtggcaccgagtcggtgccctttggcttcttttttgcactcacactggccagagtgaggattgcagaattttt

SEQ ID NO: 7029 - RNA, 151 nt, synthetic construct
  source 1..151: mol_type = other RNA; note = pegRNA
aattctgcaatcctcactctgttttagagctagaaatagcaagttaaaataaggctagtccgttatcaacttgaaaaagtggcaccgagtcggtgcgaagtcctttggcttcttttttgcactcacactgaccagagtgaggattgcagaa

SEQ ID NO: 7030 - RNA, 151 nt, synthetic construct
  source 1..151: mol_type = other RNA; note = pegRNA
aattctgcaatcctcactctgttttagagctagaaatagcaagttaaaataaggctagtccgttatcaacttgaaaaagtggcaccgagtcggtgcgaagtcctttggcttcttttttgcactcacactgaccagagtgaggattgctttt

SEQ ID NO: 7031 - RNA, 151 nt, synthetic construct
  source 1..151: mol_type = other RNA; note = pegRNA
aattctgcaatcctcactctgttttagagctagaaatagcaagttaaaataaggctagtccgttatcaacttgaaaaagtggcaccgagtcggtgcgaagtcctttggcttcttttttgcactcacactggccagagtgaggattgcagaa

SEQ ID NO: 7032 - RNA, 151 nt, synthetic construct
  source 1..151: mol_type = other RNA; note = pegRNA
aattctgcaatcctcactctgttttagagctagaaatagcaagttaaaataaggctagtccgttatcaacttgaaaaagtggcaccgagtcggtgcgaagtcctttggcttcttttttgcactcacactggccagagtgaggattgctttt

SEQ ID NO: 7033 - RNA, 151 nt, synthetic construct
  source 1..151: mol_type = other RNA; note = pegRNA
aattctgcaatcctcactctgttttagagctagaaatagcaagttaaaataaggctagtccgttatcaacttgaaaaagtggcaccgagtcggtgcgtcctttggcttcttttttgcactcacactgaccagagtgaggattgcagatttt

SEQ ID NO: 7034 - RNA, 151 nt, synthetic construct
  source 1..151: mol_type = other RNA; note = pegRNA
aattctgcaatcctcactctgttttagagctagaaatagcaagttaaaataaggctagtccgttatcaacttgaaaaagtggcaccgagtcggtgcgtcctttggcttcttttttgcactcacactggccagagtgaggattgcagatttt

SEQ ID NO: 7035 - RNA, 151 nt, synthetic construct
  source 1..151: mol_type = other RNA; note = pegRNA
aattctgcaatcctcactctgttttagagctagaaatagcaagttaaaataaggctagtccgttatcaacttgaaaaagtggcaccgagtcggtgctcctttggcttcttttttgcactcacactgaccagagtgaggattgcagaatttt

SEQ ID NO: 7036 - RNA, 151 nt, synthetic construct
  source 1..151: mol_type = other RNA; note = pegRNA
aattctgcaatcctcactctgttttagagctagaaatagcaagttaaaataaggctagtccgttatcaacttgaaaaagtggcaccgagtcggtgctcctttggcttcttttttgcactcacactggccagagtgaggattgcagaatttt

SEQ ID NO: 7037 - RNA, 152 nt, synthetic construct
  source 1..152: mol_type = other RNA; note = pegRNA
aattctgcaatcctcactctgttttagagctagaaatagcaagttaaaataaggctagtccgttatcaacttgaaaaagtggcaccgagtcggtgcaagtcctttggcttcttttttgcactcacactgaccagagtgaggattgcagtttt

SEQ ID NO: 7038 - RNA, 152 nt, synthetic construct
  source 1..152: mol_type = other RNA; note = pegRNA
aattctgcaatcctcactctgttttagagctagaaatagcaagttaaaataaggctagtccgttatcaacttgaaaaagtggcaccgagtcggtgcaagtcctttggcttcttttttgcactcacactggccagagtgaggattgcagtttt

SEQ ID NO: 7039 - RNA, 152 nt, synthetic construct
  source 1..152: mol_type = other RNA; note = pegRNA
aattctgcaatcctcactctgttttagagctagaaatagcaagttaaaataaggctagtccgttatcaacttgaaaaagtggcaccgagtcggtgcagtcctttggcttcttttttgcactcacactgaccagagtgaggattgcagatttt

SEQ ID NO: 7040 - RNA, 152 nt, synthetic construct
  source 1..152: mol_type = other RNA; note = pegRNA
aattctgcaatcctcactctgttttagagctagaaatagcaagttaaaataaggctagtccgttatcaacttgaaaaagtggcaccgagtcggtgcagtcctttggcttcttttttgcactcacactggccagagtgaggattgcagatttt

SEQ ID NO: 7041 - RNA, 152 nt, synthetic construct
  source 1..152: mol_type = other RNA; note = pegRNA
aattctgcaatcctcactctgttttagagctagaaatagcaagttaaaataaggctagtccgttatcaacttgaaaaagtggcaccgagtcggtgcgaagtcctttggcttcttttttgcactcacactgaccagagtgaggattgcagaat

SEQ ID NO: 7042 - RNA, 152 nt, synthetic construct
  source 1..152: mol_type = other RNA; note = pegRNA
aattctgcaatcctcactctgttttagagctagaaatagcaagttaaaataaggctagtccgttatcaacttgaaaaagtggcaccgagtcggtgcgaagtcctttggcttcttttttgcactcacactgaccagagtgaggattgcatttt

SEQ ID NO: 7043 - RNA, 152 nt, synthetic construct
  source 1..152: mol_type = other RNA; note = pegRNA
aattctgcaatcctcactctgttttagagctagaaatagcaagttaaaataaggctagtccgttatcaacttgaaaaagtggcaccgagtcggtgcgaagtcctttggcttcttttttgcactcacactggccagagtgaggattgcagaat

SEQ ID NO: 7044 - RNA, 152 nt, synthetic construct
  source 1..152: mol_type = other RNA; note = pegRNA
aattctgcaatcctcactctgttttagagctagaaatagcaagttaaaataaggctagtccgttatcaacttgaaaaagtggcaccgagtcggtgcgaagtcctttggcttcttttttgcactcacactggccagagtgaggattgcatttt

SEQ ID NO: 7045 - RNA, 152 nt, synthetic construct
  source 1..152: mol_type = other RNA; note = pegRNA
aattctgcaatcctcactctgttttagagctagaaatagcaagttaaaataaggctagtccgttatcaacttgaaaaagtggcaccgagtcggtgcgtcctttggcttcttttttgcactcacactgaccagagtgaggattgcagaatttt

SEQ ID NO: 7046 - RNA, 152 nt, synthetic construct
  source 1..152: mol_type = other RNA; note = pegRNA
aattctgcaatcctcactctgttttagagctagaaatagcaagttaaaataaggctagtccgttatcaacttgaaaaagtggcaccgagtcggtgcgtcctttggcttcttttttgcactcacactggccagagtgaggattgcagaatttt

SEQ ID NO: 7047 - RNA, 152 nt, synthetic construct
  source 1..152: mol_type = other RNA; note = pegRNA
aattctgcaatcctcactctgttttagagctagaaatagcaagttaaaataaggctagtccgttatcaacttgaaaaagtggcaccgagtcggtgctcctttggcttcttttttgcactcacactgaccagagtgaggattgcagaattttt

SEQ ID NO: 7048 - RNA, 152 nt, synthetic construct
  source 1..152: mol_type = other RNA; note = pegRNA
aattctgcaatcctcactctgttttagagctagaaatagcaagttaaaataaggctagtccgttatcaacttgaaaaagtggcaccgagtcggtgctcctttggcttcttttttgcactcacactggccagagtgaggattgcagaattttt

SEQ ID NO: 7049 - RNA, 153 nt, synthetic construct
  source 1..153: mol_type = other RNA; note = pegRNA
aattctgcaatcctcactctgttttagagctagaaatagcaagttaaaataaggctagtccgttatcaacttgaaaaagtggcaccgagtcggtgcaagtcctttggcttcttttttgcactcacactgaccagagtgaggattgcagatttt

SEQ ID NO: 7050 - RNA, 153 nt, synthetic construct
  source 1..153: mol_type = other RNA; note = pegRNA
aattctgcaatcctcactctgttttagagctagaaatagcaagttaaaataaggctagtccgttatcaacttgaaaaagtggcaccgagtcggtgcaagtcctttggcttcttttttgcactcacactggccagagtgaggattgcagatttt

SEQ ID NO: 7051 - RNA, 153 nt, synthetic construct
  source 1..153: mol_type = other RNA; note = pegRNA
aattctgcaatcctcactctgttttagagctagaaatagcaagttaaaataaggctagtccgttatcaacttgaaaaagtggcaccgagtcggtgcagtcctttggcttcttttttgcactcacactgaccagagtgaggattgcagaatttt

SEQ ID NO: 7052 - RNA, 153 nt, synthetic construct
  source 1..153: mol_type = other RNA; note = pegRNA
aattctgcaatcctcactctgttttagagctagaaatagcaagttaaaataaggctagtccgttatcaacttgaaaaagtggcaccgagtcggtgcagtcctttggcttcttttttgcactcacactggccagagtgaggattgcagaatttt

SEQ ID NO: 7053 - RNA, 153 nt, synthetic construct
  source 1..153: mol_type = other RNA; note = pegRNA
aattctgcaatcctcactctgttttagagctagaaatagcaagttaaaataaggctagtccgttatcaacttgaaaaagtggcaccgagtcggtgcgaagtcctttggcttcttttttgcactcacactgaccagagtgaggattgcagtttt

SEQ ID NO: 7054 - RNA, 153 nt, synthetic construct
  source 1..153: mol_type = other RNA; note = pegRNA
aattctgcaatcctcactctgttttagagctagaaatagcaagttaaaataaggctagtccgttatcaacttgaaaaagtggcaccgagtcggtgcgaagtcctttggcttcttttttgcactcacactggccagagtgaggattgcagtttt

SEQ ID NO: 7055 - RNA, 153 nt, synthetic construct
  source 1..153: mol_type = other RNA; note = pegRNA
aattctgcaatcctcactctgttttagagctagaaatagcaagttaaaataaggctagtccgttatcaacttgaaaaagtggcaccgagtcggtgcgtcctttggcttcttttttgcactcacactgaccagagtgaggattgcagaattttt

SEQ ID NO: 7056 - RNA, 153 nt, synthetic construct
  source 1..153: mol_type = other RNA; note = pegRNA
aattctgcaatcctcactctgttttagagctagaaatagcaagttaaaataaggctagtccgttatcaacttgaaaaagtggcaccgagtcggtgcgtcctttggcttcttttttgcactcacactggccagagtgaggattgcagaattttt

SEQ ID NO: 7057 - RNA, 154 nt, synthetic construct
  source 1..154: mol_type = other RNA; note = pegRNA
aattctgcaatcctcactctgttttagagctagaaatagcaagttaaaataaggctagtccgttatcaacttgaaaaagtggcaccgagtcggtgcaagtcctttggcttcttttttgcactcacactgaccagagtgaggattgcagaatttt

SEQ ID NO: 7058 - RNA, 154 nt, synthetic construct
  source 1..154: mol_type = other RNA; note = pegRNA
aattctgcaatcctcactctgttttagagctagaaatagcaagttaaaataaggctagtccgttatcaacttgaaaaagtggcaccgagtcggtgcaagtcctttggcttcttttttgcactcacactggccagagtgaggattgcagaatttt

SEQ ID NO: 7059 - RNA, 154 nt, synthetic construct
  source 1..154: mol_type = other RNA; note = pegRNA
aattctgcaatcctcactctgttttagagctagaaatagcaagttaaaataaggctagtccgttatcaacttgaaaaagtggcaccgagtcggtgcagtcctttggcttcttttttgcactcacactgaccagagtgaggattgcagaattttt

SEQ ID NO: 7060 - RNA, 154 nt, synthetic construct
  source 1..154: mol_type = other RNA; note = pegRNA
aattctgcaatcctcactctgttttagagctagaaatagcaagttaaaataaggctagtccgttatcaacttgaaaaagtggcaccgagtcggtgcagtcctttggcttcttttttgcactcacactggccagagtgaggattgcagaattttt

SEQ ID NO: 7061 - RNA, 154 nt, synthetic construct
  source 1..154: mol_type = other RNA; note = pegRNA
aattctgcaatcctcactctgttttagagctagaaatagcaagttaaaataaggctagtccgttatcaacttgaaaaagtggcaccgagtcggtgcgaagtcctttggcttcttttttgcactcacactgaccagagtgaggattgcagatttt

SEQ ID NO: 7062 - RNA, 154 nt, synthetic construct
  source 1..154: mol_type = other RNA; note = pegRNA
aattctgcaatcctcactctgttttagagctagaaatagcaagttaaaataaggctagtccgttatcaacttgaaaaagtggcaccgagtcggtgcgaagtcctttggcttcttttttgcactcacactggccagagtgaggattgcagatttt

SEQ ID NO: 7063 - RNA, 155 nt, synthetic construct
  source 1..155: mol_type = other RNA; note = pegRNA
aattctgcaatcctcactctgttttagagctagaaatagcaagttaaaataaggctagtccgttatcaacttgaaaaagtggcaccgagtcggtgcaagtcctttggcttcttttttgcactcacactgaccagagtgaggattgcagaattttt

SEQ ID NO: 7064 - RNA, 155 nt, synthetic construct
  source 1..155: mol_type = other RNA; note = pegRNA
aattctgcaatcctcactctgttttagagctagaaatagcaagttaaaataaggctagtccgttatcaacttgaaaaagtggcaccgagtcggtgcaagtcctttggcttcttttttgcactcacactggccagagtgaggattgcagaattttt

SEQ ID NO: 7065 - RNA, 155 nt, synthetic construct
  source 1..155: mol_type = other RNA; note = pegRNA
aattctgcaatcctcactctgttttagagctagaaatagcaagttaaaataaggctagtccgttatcaacttgaaaaagtggcaccgagtcggtgcgaagtcctttggcttcttttttgcactcacactgaccagagtgaggattgcagaatttt

SEQ ID NO: 7066 - RNA, 155 nt, synthetic construct
  source 1..155: mol_type = other RNA; note = pegRNA
aattctgcaatcctcactctgttttagagctagaaatagcaagttaaaataaggctagtccgttatcaacttgaaaaagtggcaccgagtcggtgcgaagtcctttggcttcttttttgcactcacactggccagagtgaggattgcagaatttt

SEQ ID NO: 7067 - RNA, 156 nt, synthetic construct
  source 1..156: mol_type = other RNA; note = pegRNA
aattctgcaatcctcactctgttttagagctagaaatagcaagttaaaataaggctagtccgttatcaacttgaaaaagtggcaccgagtcggtgcgaagtcctttggcttcttttttgcactcacactgaccagagtgaggattgcagaattttt

SEQ ID NO: 7068 - RNA, 156 nt, synthetic construct
  source 1..156: mol_type = other RNA; note = pegRNA
aattctgcaatcctcactctgttttagagctagaaatagcaagttaaaataaggctagtccgttatcaacttgaaaaagtggcaccgagtcggtgcgaagtcctttggcttcttttttgcactcacactggccagagtgaggattgcagaattttt

SEQ ID NO: 7069-7073 - skipped (5 entries)

SEQ ID NO: 7074 - RNA, 10 nt, synthetic construct
  source 1..10: mol_type = other RNA; note = PBS
gcagggctca

SEQ ID NO: 7075 - RNA, 11 nt, synthetic construct
  source 1..11: mol_type = other RNA; note = PBS
gcagggctcac

SEQ ID NO: 7076 - RNA, 12 nt, synthetic construct
  source 1..12: mol_type = other RNA; note = PBS
gcagggctcaca

SEQ ID NO: 7077 - RNA, 13 nt, synthetic construct
  source 1..13: mol_type = other RNA; note = PBS
gcagggctcacat

SEQ ID NO: 7078 - RNA, 14 nt, synthetic construct
  source 1..14: mol_type = other RNA; note = PBS
gcagggctcacatc

SEQ ID NO: 7079 - RNA, 15 nt, synthetic construct
  source 1..15: mol_type = other RNA; note = PBS
gcagggctcacatcc

SEQ ID NO: 7080 - RNA, 16 nt, synthetic construct
  source 1..16: mol_type = other RNA; note = PBS
gcagggctcacatcca

SEQ ID NO: 7081 - RNA, 17 nt, synthetic construct
  source 1..17: mol_type = other RNA; note = PBS
gcagggctcacatccaa

SEQ ID NO: 7082 - RNA, 18 nt, synthetic construct
  source 1..18: mol_type = other RNA; note = PBS
gcagggctcacatccaac

SEQ ID NO: 7083 - RNA, 19 nt, synthetic construct
  source 1..19: mol_type = other RNA; note = PBS
gcagggctcacatccaaca

SEQ ID NO: 7084 - RNA, 17 nt, synthetic construct
  source 1..17: mol_type = other RNA; note = PEgRNA spacer (TG PAM)
gatgtgagccctgccag

SEQ ID NO: 7085 - RNA, 18 nt, synthetic construct
  source 1..18: mol_type = other RNA; note = PEgRNA spacer (TG PAM)
ggatgtgagccctgccag

SEQ ID NO: 7086 - RNA, 19 nt, synthetic construct
  source 1..19: mol_type = other RNA; note = PEgRNA spacer (TG PAM)
tggatgtgagccctgccag

SEQ ID NO: 7087 - RNA, 21 nt, synthetic construct
  source 1..21: mol_type = other RNA; note = PEgRNA spacer (TG PAM)
gttggatgtgagccctgccag

SEQ ID NO: 7088 - RNA, 22 nt, synthetic construct
  source 1..22: mol_type = other RNA; note = PEgRNA spacer (TG PAM)
tgttggatgtgagccctgccag

SEQ ID NO: 7089 - RNA, 36 nt, synthetic construct
  source 1..36: mol_type = other RNA; note = RTT
gcagaatttgttcactgagccatggaggttacactg

SEQ ID NO: 7090 - RNA, 37 nt, synthetic construct
  source 1..37: mol_type = other RNA; note = RTT
tgcagaatttgttcactgagccatggaggttacactg

SEQ ID NO: 7091 - RNA, 38 nt, synthetic construct
  source 1..38: mol_type = other RNA; note = RTT
ttgcagaatttgttcactgagccatggaggttacactg

SEQ ID NO: 7092 - RNA, 39 nt, synthetic construct
  source 1..39: mol_type = other RNA; note = RTT
attgcagaatttgttcactgagccatggaggttacactg

SEQ ID NO: 7093 - RNA, 40 nt, synthetic construct
  source 1..40: mol_type = other RNA; note = RTT
gattgcagaatttgttcactgagccatggaggttacactg

SEQ ID NO: 7094-7098 - skipped (5 entries)

SEQ ID NO: 7099 - RNA, 10 nt, synthetic construct
  source 1..10: mol_type = other RNA; note = PBS
tgaggattgc

SEQ ID NO: 7100 - RNA, 11 nt, synthetic construct
  source 1..11: mol_type = other RNA; note = PBS
tgaggattgca

SEQ ID NO: 7101 - RNA, 12 nt, synthetic construct
  source 1..12: mol_type = other RNA; note = PBS
tgaggattgcag

SEQ ID NO: 7102 - RNA, 13 nt, synthetic construct
  source 1..13: mol_type = other RNA; note = PBS
tgaggattgcaga

SEQ ID NO: 7103 - RNA, 15 nt, synthetic construct
  source 1..15: mol_type = other RNA; note = PBS
tgaggattgcagaat

SEQ ID NO: 7104 - RNA, 16 nt, synthetic construct
  source 1..16: mol_type = other RNA; note = PBS
tgaggattgcagaatt

SEQ ID NO: 7105 - RNA, 17 nt, synthetic construct
  source 1..17: mol_type = other RNA; note = PBS
tgaggattgcagaattt

SEQ ID NO: 7106 - RNA, 18 nt, synthetic construct
  source 1..18: mol_type = other RNA; note = PBS
tgaggattgcagaatttg

SEQ ID NO: 7107 - RNA, 19 nt, synthetic construct
  source 1..19: mol_type = other RNA; note = PBS
tgaggattgcagaatttgt

SEQ ID NO: 7108 - RNA, 15 nt, synthetic construct
  source 1..15: mol_type = other RNA; note = RTT*1,2,3,5,8,9,10
tcacactgcccagag

SEQ ID NO: 7109 - RNA, 16 nt, synthetic construct
  source 1..16: mol_type = other RNA; note = RTT*1,2,3,5,8,9,10
ctcacactgcccagag

SEQ ID NO: 7110 - RNA, 18 nt, synthetic construct
  source 1..18: mol_type = other RNA; note = RTT*4 (TGGG-to-TGGT PAM silencing edit)
cactcacactgaccagag

SEQ ID NO: 7111 - RNA, 18 nt, synthetic construct
  source 1..18: mol_type = other RNA; note = RTT*6 (TGGG-to-TGGC PAM silencing edit)
cactcacactggccagag

SEQ ID NO: 7112 - RNA, 18 nt, synthetic construct
  source 1..18: mol_type = other RNA; note = RTT*7 (TGGG-to-TGGA PAM silencing edit)
cactcacactgtccagag

SEQ ID NO: 7113 - RNA, 19 nt, synthetic construct
  source 1..19: mol_type = other RNA; note = RTT*4 (TGGG-to-TGGT PAM silencing edit)
gcactcacactgaccagag

SEQ ID NO: 7114 - RNA, 19 nt, synthetic construct
  source 1..19: mol_type = other RNA; note = RTT*6 (TGGG-to-TGGC PAM silencing edit)
gcactcacactggccagag

SEQ ID NO: 7115 - RNA, 19 nt, synthetic construct
  source 1..19: mol_type = other RNA; note = RTT*7 (TGGG-to-TGGA PAM silencing edit)
gcactcacactgtccagag

SEQ ID NO: 7116 - RNA, 20 nt, synthetic construct
  source 1..20: mol_type = other RNA; note = RTT*4 (TGGG-to-TGGT PAM silencing edit)
tgcactcacactgaccagag

SEQ ID NO: 7117 - RNA, 20 nt, synthetic construct
  source 1..20: mol_type = other RNA; note = RTT*6 (TGGG-to-TGGC PAM silencing edit)
tgcactcacactggccagag

SEQ ID NO: 7118 - RNA, 20 nt, synthetic construct
  source 1..20: mol_type = other RNA; note = RTT*7 (TGGG-to-TGGA PAM silencing edit)
tgcactcacactgtccagag

SEQ ID NO: 7119 - RNA, 21 nt, synthetic construct
  source 1..21: mol_type = other RNA; note = RTT*4 (TGGG-to-TGGT PAM silencing edit)
ttgcactcacactgaccagag

SEQ ID NO: 7120 - RNA, 21 nt, synthetic construct
  source 1..21: mol_type = other RNA; note = RTT*6 (TGGG-to-TGGC PAM silencing edit)
ttgcactcacactggccagag

SEQ ID NO: 7121 - RNA, 21 nt, synthetic construct
  source 1..21: mol_type = other RNA; note = RTT*7 (TGGG-to-TGGA PAM silencing edit)
ttgcactcacactgtccagag

SEQ ID NO: 7122 - RNA, 22 nt, synthetic construct
  source 1..22: mol_type = other RNA; note = RTT*4 (TGGG-to-TGGT PAM silencing edit)
tttgcactcacactgaccagag

SEQ ID NO: 7123 - RNA, 22 nt, synthetic construct
  source 1..22: mol_type = other RNA; note = RTT*6 (TGGG-to-TGGC PAM silencing edit)
tttgcactcacactggccagag

SEQ ID NO: 7124 - RNA, 22 nt, synthetic construct
  source 1..22: mol_type = other RNA; note = RTT*7 (TGGG-to-TGGA PAM silencing edit)
tttgcactcacactgtccagag

SEQ ID NO: 7125 - RNA, 23 nt, synthetic construct
  source 1..23: mol_type = other RNA; note = RTT*4 (TGGG-to-TGGT PAM silencing edit)
ttttgcactcacactgaccagag

SEQ ID NO: 7126 - RNA, 23 nt, synthetic construct
  source 1..23: mol_type = other RNA; note = RTT*1,2,3,5,8,9,10
ttttgcactcacactgcccagag

SEQ ID NO: 7127 - RNA, 23 nt, synthetic construct
  source 1..23: mol_type = other RNA; note = RTT*6 (TGGG-to-TGGC PAM silencing edit)
ttttgcactcacactggccagag

SEQ ID NO: 7128 - RNA, 23 nt, synthetic construct
  source 1..23: mol_type = other RNA; note = RTT*7 (TGGG-to-TGGA PAM silencing edit)
ttttgcactcacactgtccagag

SEQ ID NO: 7129 - RNA, 24 nt, synthetic construct
  source 1..24: mol_type = other RNA; note = RTT*4 (TGGG-to-TGGT PAM silencing edit)
tttttgcactcacactgaccagag

SEQ ID NO: 7130 - RNA, 24 nt, synthetic construct
  source 1..24: mol_type = other RNA; note = RTT*1,2,3,5,8,9,10
tttttgcactcacactgcccagag

SEQ ID NO: 7131 - RNA, 24 nt, synthetic construct
  source 1..24: mol_type = other RNA; note = RTT*6 (TGGG-to-TGGC PAM silencing edit)
tttttgcactcacactggccagag

SEQ ID NO: 7132 - RNA, 24 nt, synthetic construct
  source 1..24: mol_type = other RNA; note = RTT*7 (TGGG-to-TGGA PAM silencing edit)
tttttgcactcacactgtccagag

SEQ ID NO: 7133 - RNA, 25 nt, synthetic construct
  source 1..25: mol_type = other RNA; note = RTT*4 (TGGG-to-TGGT PAM silencing edit)
ttttttgcactcacactgaccagag

SEQ ID NO: 7134 - RNA, 25 nt, synthetic construct
  source 1..25: mol_type = other RNA; note = RTT*1,2,3,5,8,9,10
ttttttgcactcacactgcccagag

SEQ ID NO: 7135 - RNA, 25 nt, synthetic construct
  source 1..25: mol_type = other RNA; note = RTT*6 (TGGG-to-TGGC PAM silencing edit)
ttttttgcactcacactggccagag

SEQ ID NO: 7136 - RNA, 25 nt, synthetic construct
  source 1..25: mol_type = other RNA; note = RTT*4 (TGGG-to-TGGT PAM silencing edit)
ttttttgcactcacactgtccagag

SEQ ID NO: 7137 - RNA, 26 nt, synthetic construct
  source 1..26: mol_type = other RNA; note = RTT*4 (TGGG-to-TGGT PAM silencing edit)
cttttttgcactcacactgaccagag

SEQ ID NO: 7138 - RNA, 26 nt, synthetic construct
  source 1..26: mol_type = other RNA; note = RTT*1,2,3,5,8,9,10
cttttttgcactcacactgcccagag

SEQ ID NO: 7139 - RNA, 26 nt, synthetic construct
  source 1..26: mol_type = other RNA; note = RTT*6 (TGGG-to-TGGC PAM silencing edit)
cttttttgcactcacactggccagag

SEQ ID NO: 7140 - RNA, 26 nt, synthetic construct
  source 1..26: mol_type = other RNA; note = RTT*7 (TGGG-to-TGGA PAM silencing edit)
cttttttgcactcacactgtccagag

SEQ ID NO: 7141 - RNA, 27 nt, synthetic construct
  source 1..27: mol_type = other RNA; note = RTT*4 (TGGG-to-TGGT PAM silencing edit)
tcttttttgcactcacactgaccagag

SEQ ID NO: 7142 - RNA, 27 nt, synthetic construct
  source 1..27: mol_type = other RNA; note = RTT*1,2,3,5,8,9,10
tcttttttgcactcacactgcccagag

SEQ ID NO: 7143 - RNA, 27 nt, synthetic construct
  source 1..27: mol_type = other RNA; note = RTT*6 (TGGG-to-TGGC PAM silencing edit)
tcttttttgcactcacactggccagag

SEQ ID NO: 7144 - RNA, 27 nt, synthetic construct
  source 1..27: mol_type = other RNA; note = RTT*7 (TGGG-to-TGGA PAM silencing edit)
tcttttttgcactcacactgtccagag

SEQ ID NO: 7145 - RNA, 28 nt, synthetic construct
  source 1..28: mol_type = other RNA; note = RTT*4 (TGGG-to-TGGT PAM silencing edit)
ttcttttttgcactcacactgaccagag

SEQ ID NO: 7146 - RNA, 28 nt, synthetic construct
  source 1..28: mol_type = other RNA; note = RTT*1,2,3,5,8,9,10
ttcttttttgcactcacactgcccagag

SEQ ID NO: 7147 - RNA, 28 nt, synthetic construct
  source 1..28: mol_type = other RNA; note = RTT*6 (TGGG-to-TGGC PAM silencing edit)
ttcttttttgcactcacactggccagag

SEQ ID NO: 7148 - RNA, 28 nt, synthetic construct
  source 1..28: mol_type = other RNA; note = RTT*7 (TGGG-to-TGGA PAM silencing edit)
ttcttttttgcactcacactgtccagag

SEQ ID NO: 7149 - RNA, 29 nt, synthetic construct
  source 1..29: mol_type = other RNA; note = RTT*4 (TGGG-to-TGGT PAM silencing edit)
cttcttttttgcactcacactgaccagag

SEQ ID NO: 7150 - RNA, 29 nt, synthetic construct
  source 1..29: mol_type = other RNA; note = RTT*1,2,3,5,8,9,10
cttcttttttgcactcacactgcccagag

SEQ ID NO: 7151 - RNA, 29 nt, synthetic construct
  source 1..29: mol_type = other RNA; note = RTT*6 (TGGG-to-TGGC PAM silencing edit)
cttcttttttgcactcacactggccagag

SEQ ID NO: 7152 - RNA, 29 nt, synthetic construct
  source 1..29: mol_type = other RNA; note = RTT*7 (TGGG-to-TGGA PAM silencing edit)
cttcttttttgcactcacactgtccagag

SEQ ID NO: 7153 - RNA, 30 nt, synthetic construct
  source 1..30: mol_type = other RNA; note = RTT*4 (TGGG-to-TGGT PAM silencing edit)
gcttcttttttgcactcacactgaccagag

SEQ ID NO: 7154 - RNA, 30 nt, synthetic construct
  source 1..30: mol_type = other RNA; note = RTT*1,2,3,5,8,9,10
gcttcttttttgcactcacactgcccagag

SEQ ID NO: 7155 - RNA, 30 nt, synthetic construct
  source 1..30: mol_type = other RNA; note = RTT*6 (TGGG-to-TGGC PAM silencing edit)
gcttcttttttgcactcacactggccagag

SEQ ID NO: 7156 - RNA, 30 nt, synthetic construct
  source 1..30: mol_type = other RNA; note = RTT*7 (TGGG-to-TGGA PAM silencing edit)
gcttcttttttgcactcacactgtccagag

SEQ ID NO: 7157 - RNA, 31 nt, synthetic construct
  source 1..31: mol_type = other RNA; note = RTT*4 (TGGG-to-TGGT PAM silencing edit)
ggcttcttttttgcactcacactgaccagag

SEQ ID NO: 7158 - RNA, 31 nt, synthetic construct
  source 1..31: mol_type = other RNA; note = RTT*1,2,3,5,8,9,10
ggcttcttttttgcactcacactgcccagag

SEQ ID NO: 7159 - RNA, 31 nt, synthetic construct
  source 1..31: mol_type = other RNA; note = RTT*6 (TGGG-to-TGGC PAM silencing edit)
ggcttcttttttgcactcacactggccagag

SEQ ID NO: 7160 - RNA, 31 nt, synthetic construct
  source 1..31: mol_type = other RNA; note = RTT*7 (TGGG-to-TGGA PAM silencing edit)
ggcttcttttttgcactcacactgtccagag

SEQ ID NO: 7161 - RNA, 32 nt, synthetic construct
  source 1..32: mol_type = other RNA; note = RTT*4 (TGGG-to-TGGT PAM silencing edit)
tggcttcttttttgcactcacactgaccagag

SEQ ID NO: 7162 - RNA, 32 nt, synthetic construct
  source 1..32: mol_type = other RNA; note = RTT*1,2,3,5,8,9,10
tggcttcttttttgcactcacactgcccagag

SEQ ID NO: 7163 - RNA, 32 nt, synthetic construct
  source 1..32: mol_type = other RNA; note = RTT*6 (TGGG-to-TGGC PAM silencing edit)
tggcttcttttttgcactcacactggccagag

SEQ ID NO: 7164 - RNA, 32 nt, synthetic construct
  source 1..32: mol_type = other RNA; note = RTT*7 (TGGG-to-TGGA PAM silencing edit)
tggcttcttttttgcactcacactgtccagag

SEQ ID NO: 7165 - RNA, 33 nt, synthetic construct
  source 1..33: mol_type = other RNA; note = RTT*4 (TGGG-to-TGGT PAM silencing edit)
ttggcttcttttttgcactcacactgaccagag

SEQ ID NO: 7166 - RNA, 33 nt, synthetic construct
  source 1..33: mol_type = other RNA; note = RTT*1,2,3,5,8,9,10
ttggcttcttttttgcactcacactgcccagag

SEQ ID NO: 7167 - RNA, 33 nt, synthetic construct
  source 1..33: mol_type = other RNA; note = RTT*6 (TGGG-to-TGGC PAM silencing edit)
ttggcttcttttttgcactcacactggccagag

SEQ ID NO: 7168 - RNA, 33 nt, synthetic construct
  source 1..33: mol_type = other RNA; note = RTT*7 (TGGG-to-TGGA PAM silencing edit)
ttggcttcttttttgcactcacactgtccagag

SEQ ID NO: 7169 - RNA, 34 nt, synthetic construct
  source 1..34: mol_type = other RNA; note = RTT*4 (TGGG-to-TGGT PAM silencing edit)
tttggcttcttttttgcactcacactgaccagag

SEQ ID NO: 7170 - RNA, 34 nt, synthetic construct
  source 1..34: mol_type = other RNA; note = RTT*1,2,3,5,8,9,10
tttggcttcttttttgcactcacactgcccagag

SEQ ID NO: 7171 - RNA, 34 nt, synthetic construct
  source 1..34: mol_type = other RNA; note = RTT*6 (TGGG-to-TGGC PAM silencing edit)
tttggcttcttttttgcactcacactggccagag

SEQ ID NO: 7172 - RNA, 34 nt, synthetic construct
  source 1..34: mol_type = other RNA; note = RTT*7 (TGGG-to-TGGA PAM silencing edit)
tttggcttcttttttgcactcacactgtccagag

SEQ ID NO: 7173 - RNA, 35 nt, synthetic construct
  source 1..35: mol_type = other RNA; note = RTT*4 (TGGG-to-TGGT PAM silencing edit)
ctttggcttcttttttgcactcacactgaccagag

SEQ ID NO: 7174 - RNA, 35 nt, synthetic construct
  source 1..35: mol_type = other RNA; note = RTT*1,2,3,5,8,9,10
ctttggcttcttttttgcactcacactgcccagag

SEQ ID NO: 7175 - RNA, 35 nt, synthetic construct
  source 1..35: mol_type = other RNA; note = RTT*6 (TGGG-to-TGGC PAM silencing edit)
ctttggcttcttttttgcactcacactggccagag

SEQ ID NO: 7176 - RNA, 35 nt, synthetic construct
  source 1..35: mol_type = other RNA; note = RTT*7 (TGGG-to-TGGA PAM silencing edit)
ctttggcttcttttttgcactcacactgtccagag

SEQ ID NO: 7177 - RNA, 36 nt, synthetic construct
  source 1..36: mol_type = other RNA; note = RTT*4 (TGGG-to-TGGT PAM silencing edit)
cctttggcttcttttttgcactcacactgaccagag

SEQ ID NO: 7178 - RNA, 36 nt, synthetic construct
  source 1..36: mol_type = other RNA; note = RTT*1,2,3,5,8,9,10
cctttggcttcttttttgcactcacactgcccagag

SEQ ID NO: 7179 - RNA, 36 nt, synthetic construct
  source 1..36: mol_type = other RNA; note = RTT*6 (TGGG-to-TGGC PAM silencing edit)
cctttggcttcttttttgcactcacactggccagag

SEQ ID NO: 7180 - RNA, 36 nt, synthetic construct
  source 1..36: mol_type = other RNA; note = RTT*7 (TGGG-to-TGGA PAM silencing edit)
cctttggcttcttttttgcactcacactgtccagag

SEQ ID NO: 7181 - RNA, 37 nt, synthetic construct
  source 1..37: mol_type = other RNA; note = RTT*4 (TGGG-to-TGGT PAM silencing edit)
tcctttggcttcttttttgcactcacactgaccagag

SEQ ID NO: 7182 - RNA, 37 nt, synthetic construct
  source 1..37: mol_type = other RNA; note = RTT*1,2,3,5,8,9,10
tcctttggcttcttttttgcactcacactgcccagag

SEQ ID NO: 7183 - RNA, 37 nt, synthetic construct
  source 1..37: mol_type = other RNA; note = RTT*6 (TGGG-to-TGGC PAM silencing edit)
tcctttggcttcttttttgcactcacactggccagag

SEQ ID NO: 7184 - RNA, 37 nt, synthetic construct
  source 1..37: mol_type = other RNA; note = RTT*7 (TGGG-to-TGGA PAM silencing edit)
tcctttggcttcttttttgcactcacactgtccagag

SEQ ID NO: 7185 - RNA, 38 nt, synthetic construct
  source 1..38: mol_type = other RNA; note = RTT*4 (TGGG-to-TGGT PAM silencing edit)
gtcctttggcttcttttttgcactcacactgaccagag

SEQ ID NO: 7186 - RNA, 38 nt, synthetic construct
  source 1..38: mol_type = other RNA; note = RTT*1,2,3,5,8,9,10
gtcctttggcttcttttttgcactcacactgcccagag

SEQ ID NO: 7187 - RNA, 38 nt, synthetic construct
  source 1..38: mol_type = other RNA; note = RTT*6 (TGGG-to-TGGC PAM silencing edit)
gtcctttggcttcttttttgcactcacactggccagag

SEQ ID NO: 7188 - RNA, 38 nt, synthetic construct
  source 1..38: mol_type = other RNA; note = RTT*7 (TGGG-to-TGGA PAM silencing edit)
gtcctttggcttcttttttgcactcacactgtccagag

SEQ ID NO: 7189 - RNA, 39 nt, synthetic construct
  source 1..39: mol_type = other RNA; note = RTT*4 (TGGG-to-TGGT PAM silencing edit)
agtcctttggcttcttttttgcactcacactgaccagag

SEQ ID NO: 7190 - RNA, 39 nt, synthetic construct
  source 1..39: mol_type = other RNA; note = RTT*1,2,3,5,8,9,10
agtcctttggcttcttttttgcactcacactgcccagag

SEQ ID NO: 7191 - RNA, 39 nt, synthetic construct
  source 1..39: mol_type = other RNA; note = RTT*6 (TGGG-to-TGGC PAM silencing edit)
agtcctttggcttcttttttgcactcacactggccagag

SEQ ID NO: 7192 - RNA, 39 nt, synthetic construct
  source 1..39: mol_type = other RNA; note = RTT*7 (TGGG-to-TGGA PAM silencing edit)
agtcctttggcttcttttttgcactcacactgtccagag

SEQ ID NO: 7193 - RNA, 40 nt, synthetic construct
  source 1..40: mol_type = other RNA; note = RTT*4 (TGGG-to-TGGT PAM silencing edit)
aagtcctttggcttcttttttgcactcacactgaccagag

SEQ ID NO: 7194 - RNA, 40 nt, synthetic construct
  source 1..40: mol_type = other RNA; note = RTT*1,2,3,5,8,9,10
aagtcctttggcttcttttttgcactcacactgcccagag

SEQ ID NO: 7195 - RNA, 40 nt, synthetic construct
  source 1..40: mol_type = other RNA; note = RTT*6 (TGGG-to-TGGC PAM silencing edit)
aagtcctttggcttcttttttgcactcacactggccagag

SEQ ID NO: 7196 - RNA, 40 nt, synthetic construct
  source 1..40: mol_type = other RNA; note = RTT*7 (TGGG-to-TGGA PAM silencing edit)
aagtcctttggcttcttttttgcactcacactgtccagag

SEQ ID NO: 7197 - RNA, 20 nt, synthetic construct
  source 1..20: mol_type = other RNA; note = PE3b*4 ngRNA spacer (GAGG PAM)
gcactcacactgaccagagt

SEQ ID NO: 7198 - RNA, 20 nt, synthetic construct
  source 1..20: mol_type = other RNA; note = PE3b*6 ngRNA spacer (GAGG PAM)
gcactcacactggccagagt

SEQ ID NO: 7199 - RNA, 20 nt, synthetic construct
  source 1..20: mol_type = other RNA; note = PE3b*7 ngRNA spacer (GAGG PAM)
gcactcacactgtccagagt

SEQ ID NO: 7200 - RNA, 123 nt, synthetic construct
  source 1..123: mol_type = other RNA; note = pegRNA
aaattctgcaatcctcactcgttttagagctagaaatagcaagttaaaataaggctagtccgttatcaacttgaaaaagtggcaccgagtcggtgcgcactcacactgcccagagtgaggatt

SEQ ID NO: 7201 - RNA, 124 nt, synthetic construct
  source 1..124: mol_type = other RNA; note = pegRNA
aaattctgcaatcctcactcgttttagagctagaaatagcaagttaaaataaggctagtccgttatcaacttgaaaaagtggcaccgagtcggtgctgcactcacactgcccagagtgaggatt

SEQ ID NO: 7202 - RNA, 125 nt, synthetic construct
  source 1..125: mol_type = other RNA; note = pegRNA
aaattctgcaatcctcactcgttttagagctagaaatagcaagttaaaataaggctagtccgttatcaacttgaaaaagtggcaccgagtcggtgcgcactcacactgcccagagtgaggattgc

SEQ ID NO: 7203 - RNA, 126 nt, synthetic construct
  source 1..126: mol_type = other RNA; note = pegRNA
aaattctgcaatcctcactcgttttagagctagaaatagcaagttaaaataaggctagtccgttatcaacttgaaaaagtggcaccgagtcggtgctgcactcacactgcccagagtgaggattgc

SEQ ID NO: 7204 - RNA, 126 nt, synthetic construct
  source 1..126: mol_type = other RNA; note = pegRNA
aaattctgcaatcctcactcgttttagagctagaaatagcaagttaaaataaggctagtccgttatcaacttgaaaaagtggcaccgagtcggtgctttgcactcacactgcccagagtgaggatt

SEQ ID NO: 7205 - RNA, 127 nt, synthetic construct
  source 1..127: mol_type = other RNA; note = pegRNA
aaattctgcaatcctcactcgttttagagctagaaatagcaagttaaaataaggctagtccgttatcaacttgaaaaagtggcaccgagtcggtgcgcactcacactgcccagagtgaggattgcag

SEQ ID NO: 7206 - RNA, 127 nt, synthetic construct
  source 1..127: mol_type = other RNA; note = pegRNA
aaattctgcaatcctcactcgttttagagctagaaatagcaagttaaaataaggctagtccgttatcaacttgaaaaagtggcaccgagtcggtgcgcactcacactgcccagagtgaggatttttt

SEQ ID NO: 7207 - RNA, 128 nt, synthetic construct
  source 1..128: mol_type = other RNA; note = pegRNA
aaattctgcaatcctcactcgttttagagctagaaatagcaagttaaaataaggctagtccgttatcaacttgaaaaagtggcaccgagtcggtgctgcactcacactgcccagagtgaggattgcag

SEQ ID NO: 7208 - RNA, 128 nt, synthetic construct
  source 1..128: mol_type = other RNA; note = pegRNA
aaattctgcaatcctcactcgttttagagctagaaatagcaagttaaaataaggctagtccgttatcaacttgaaaaagtggcaccgagtcggtgctgcactcacactgcccagagtgaggatttttt

SEQ ID NO: 7209 - RNA, 128 nt, synthetic construct
  source 1..128: mol_type = other RNA; note = pegRNA
aaattctgcaatcctcactcgttttagagctagaaatagcaagttaaaataaggctagtccgttatcaacttgaaaaagtggcaccgagtcggtgctttgcactcacactgcccagagtgaggattgc

SEQ ID NO: 7210 - RNA, 129 nt, synthetic construct
  source 1..129: mol_type = other RNA; note = pegRNA
aaattctgcaatcctcactcgttttagagctagaaatagcaagttaaaataaggctagtccgttatcaacttgaaaaagtggcaccgagtcggtgcgcactcacactgcccagagtgaggattgcagaa

SEQ ID NO: 7211 - RNA, 129 nt, synthetic construct
  source 1..129: mol_type = other RNA; note = pegRNA
aaattctgcaatcctcactcgttttagagctagaaatagcaagttaaaataaggctagtccgttatcaacttgaaaaagtggcaccgagtcggtgcgcactcacactgcccagagtgaggattgctttt

SEQ ID NO: 7212 - RNA, 130 nt, synthetic construct
  source 1..130: mol_type = other RNA; note = pegRNA
aaattctgcaatcctcactcgttttagagctagaaatagcaagttaaaataaggctagtccgttatcaacttgaaaaagtggcaccgagtcggtgctgcactcacactgcccagagtgaggattgcagaa

SEQ ID NO: 7213 - RNA, 130 nt, synthetic construct
  source 1..130: mol_type = other RNA; note = pegRNA
aaattctgcaatcctcactcgttttagagctagaaatagcaagttaaaataaggctagtccgttatcaacttgaaaaagtggcaccgagtcggtgctgcactcacactgcccagagtgaggattgctttt

SEQ ID NO: 7214 - RNA, 130 nt, synthetic construct
  source 1..130: mol_type = other RNA; note = pegRNA
aaattctgcaatcctcactcgttttagagctagaaatagcaagttaaaataaggctagtccgttatcaacttgaaaaagtggcaccgagtcggtgctttgcactcacactgcccagagtgaggattgcag

SEQ ID NO: 7215 - RNA, 130 nt, synthetic construct
  source 1..130: mol_type = other RNA; note = pegRNA
aaattctgcaatcctcactcgttttagagctagaaatagcaagttaaaataaggctagtccgttatcaacttgaaaaagtggcaccgagtcggtgctttgcactcacactgcccagagtgaggatttttt

SEQ ID NO: 7216 - RNA, 130 nt, synthetic construct
  source 1..130: mol_type = other RNA; note = pegRNA
aaattctgcaatcctcactcgttttagagctagaaatagcaagttaaaataaggctagtccgttatcaacttgaaaaagtggcaccgagtcggtgctttgcactcacactggccagagtgaggattgcag

SEQ ID NO: 7217 - RNA, 131 nt, synthetic construct
  source 1..131: mol_type = other RNA; note = pegRNA
aaattctgcaatcctcactcgttttagagctagaaatagcaagttaaaataaggctagtccgttatcaacttgaaaaagtggcaccgagtcggtgcgcactcacactgcccagagtgaggattgcagtttt

SEQ ID NO: 7218 - RNA, 132 nt, synthetic construct
  source 1..132: mol_type = other RNA; note = pegRNA
aaattctgcaatcctcactcgttttagagctagaaatagcaagttaaaataaggctagtccgttatcaacttgaaaaagtggcaccgagtcggtgctgcactcacactgcccagagtgaggattgcagtttt

SEQ ID NO: 7219 - RNA, 132 nt, synthetic construct
  source 1..132: mol_type = other RNA; note = pegRNA
aaattctgcaatcctcactcgttttagagctagaaatagcaagttaaaataaggctagtccgttatcaacttgaaaaagtggcaccgagtcggtgctttgcactcacactgcccagagtgaggattgcagaa

SEQ ID NO: 7220 - RNA, 132 nt, synthetic construct
  source 1..132: mol_type = other RNA; note = pegRNA
aaattctgcaatcctcactcgttttagagctagaaatagcaagttaaaataaggctagtccgttatcaacttgaaaaagtggcaccgagtcggtgctttgcactcacactgcccagagtgaggattgctttt

SEQ ID NO: 7221 - RNA, 133 nt, synthetic construct
  source 1..133: mol_type = other RNA; note = pegRNA
aaattctgcaatcctcactcgttttagagctagaaatagcaagttaaaataaggctagtccgttatcaacttgaaaaagtggcaccgagtcggtgcgcactcacactgcccagagtgaggattgcagaatttt

SEQ ID NO: 7222 - RNA, 134 nt, synthetic construct
  source 1..134: mol_type = other RNA; note = pegRNA
aaattctgcaatcctcactcgttttagagctagaaatagcaagttaaaataaggctagtccgttatcaacttgaaaaagtggcaccgagtcggtgctgcactcacactgcccagagtgaggattgcagaatttt

SEQ ID NO: 7223 - RNA, 134 nt, synthetic construct
  source 1..134: mol_type = other RNA; note = pegRNA
aaattctgcaatcctcactcgttttagagctagaaatagcaagttaaaataaggctagtccgttatcaacttgaaaaagtggcaccgagtcggtgctttgcactcacactgcccagagtgaggattgcagtttt

SEQ ID NO: 7224 - RNA, 134 nt, synthetic construct
  source 1..134: mol_type = other RNA; note = pegRNA
aaattctgcaatcctcactcgttttagagctagaaatagcaagttaaaataaggctagtccgttatcaacttgaaaaagtggcaccgagtcggtgctttgcactcacactggccagagtgaggattgcagtttt

SEQ ID NO: 7225 - RNA, 136 nt, synthetic construct
  source 1..136: mol_type = other RNA; note = pegRNA
aaattctgcaatcctcactcgttttagagctagaaatagcaagttaaaataaggctagtccgttatcaacttgaaaaagtggcaccgagtcggtgctttgcactcacactgcccagagtgaggattgcagaatttt

SEQ ID NO: 7226-7230 - skipped (5 entries)

SEQ ID NO: 7231 - RNA, 10 nt, synthetic construct
  source 1..10: mol_type = other RNA; note = PBS
cactgcccag

SEQ ID NO: 7232 - RNA, 11 nt, synthetic construct
  source 1..11: mol_type = other RNA; note = PBS
cactgcccaga

SEQ ID NO: 7233 - RNA, 12 nt, synthetic construct
  source 1..12: mol_type = other RNA; note = PBS
cactgcccagag

SEQ ID NO: 7234 - RNA, 13 nt, synthetic construct
  source 1..13: mol_type = other RNA; note = PBS
cactgcccagagt

SEQ ID NO: 7235 - RNA, 14 nt, synthetic construct
  source 1..14: mol_type = other RNA; note = PBS
cactgcccagagtg

SEQ ID NO: 7236 - RNA, 15 nt, synthetic construct
  source 1..15: mol_type = other RNA; note = PBS
cactgcccagagtga

SEQ ID NO: 7237 - RNA, 16 nt, synthetic construct
  source 1..16: mol_type = other RNA; note = PBS
cactgcccagagtgag

SEQ ID NO: 7238 - RNA, 17 nt, synthetic construct
  source 1..17: mol_type = other RNA; note = PBS
cactgcccagagtgagg

SEQ ID NO: 7239 - RNA, 18 nt, synthetic construct
  source 1..18: mol_type = other RNA; note = PBS
cactgcccagagtgagga

SEQ ID NO: 7240 - RNA, 17 nt, synthetic construct
  source 1..17: mol_type = other RNA; note = PEgRNA spacer (TG PAM)
cactctgggcagtgtag

SEQ ID NO: 7241 - RNA, 18 nt, synthetic construct
  source 1..18: mol_type = other RNA; note = PEgRNA spacer (TG PAM)
tcactctgggcagtgtag

SEQ ID NO: 7242 - RNA, 19 nt, synthetic construct
  source 1..19: mol_type = other RNA; note = PEgRNA spacer (TG PAM)
ctcactctgggcagtgtag

SEQ ID NO: 7243 - RNA, 20 nt, synthetic construct
  source 1..20: mol_type = other RNA; note = PEgRNA spacer (TG PAM)
cctcactctgggcagtgtag

SEQ ID NO: 7244 - RNA, 21 nt, synthetic construct
  source 1..21: mol_type = other RNA; note = PEgRNA spacer (TG PAM)
tcctcactctgggcagtgtag

SEQ ID NO: 7245 - RNA, 22 nt, synthetic construct
  source 1..22: mol_type = other RNA; note = PEgRNA spacer (TG PAM)
atcctcactctgggcagtgtag

SEQ ID NO: 7246-7249 - skipped (4 entries)

SEQ ID NO: 7250 - RNA, 10 nt, synthetic construct
  source 1..10: mol_type = other RNA; note = RTT
tttgcactca

SEQ ID NO: 7251 - RNA, 11 nt, synthetic construct
  source 1..11: mol_type = other RNA; note = RTT
ttttgcactca

SEQ ID NO: 7252 - RNA, 12 nt, synthetic construct
  source 1..12: mol_type = other RNA; note = RTT
tttttgcactca

SEQ ID NO: 7253 - RNA, 13 nt, synthetic construct
  source 1..13: mol_type = other RNA; note = RTT
ttttttgcactca

SEQ ID NO: 7254 - RNA, 14 nt, synthetic construct
  source 1..14: mol_type = other RNA; note = RTT
cttttttgcactca

SEQ ID NO: 7255 - RNA, 15 nt, synthetic construct
  source 1..15: mol_type = other RNA; note = RTT
tcttttttgcactca

SEQ ID NO: 7256 - RNA, 16 nt, synthetic construct
  source 1..16: mol_type = other RNA; note = RTT
ttcttttttgcactca

SEQ ID NO: 7257 - RNA, 17 nt, synthetic construct
  source 1..17: mol_type = other RNA; note = RTT
cttcttttttgcactca

SEQ ID NO: 7258 - RNA, 18 nt, synthetic construct
  source 1..18: mol_type = other RNA; note = RTT
gcttcttttttgcactca

SEQ ID NO: 7259 - RNA, 19 nt, synthetic construct
  source 1..19: mol_type = other RNA; note = RTT
ggcttcttttttgcactca

SEQ ID NO: 7260 - RNA, 20 nt, synthetic construct
  source 1..20: mol_type = other RNA; note = RTT
tggcttcttttttgcactca

SEQ ID NO: 7261 - RNA, 21 nt, synthetic construct
  source 1..21: mol_type = other RNA; note = RTT
ttggcttcttttttgcactca

SEQ ID NO: 7262 - RNA, 22 nt, synthetic construct
  source 1..22: mol_type = other RNA; note = RTT
tttggcttcttttttgcactca

SEQ ID NO: 7263 - RNA, 23 nt, synthetic construct
  source 1..23: mol_type = other RNA; note = RTT
ctttggcttcttttttgcactca

SEQ ID NO: 7264 - RNA, 24 nt, synthetic construct
  source 1..24: mol_type = other RNA; note = RTT
cctttggcttcttttttgcactca

SEQ ID NO: 7265 - RNA, 25 nt, synthetic construct
  source 1..25: mol_type = other RNA; note = RTT
tcctttggcttcttttttgcactca

SEQ ID NO: 7266 - RNA, 26 nt, synthetic construct
  source 1..26: mol_type = other RNA; note = RTT
gtcctttggcttcttttttgcactca

SEQ ID NO: 7267 - RNA, 27 nt, synthetic construct
  source 1..27: mol_type = other RNA; note = RTT
agtcctttggcttcttttttgcactca

SEQ ID NO: 7268 - RNA, 28 nt, synthetic construct
  source 1..28: mol_type = other RNA; note = RTT
aagtcctttggcttcttttttgcactca

SEQ ID NO: 7269 - RNA, 29 nt, synthetic construct
  source 1..29: mol_type = other RNA; note = RTT
gaagtcctttggcttcttttttgcactca

SEQ ID NO: 7270 - RNA, 30 nt, synthetic construct
  source 1..30: mol_type = other RNA; note = RTT
tgaagtcctttggcttcttttttgcactca

SEQ ID NO: 7271 - RNA, 31 nt, synthetic construct
  source 1..31: mol_type = other RNA; note = RTT
ctgaagtcctttggcttcttttttgcactca

SEQ ID NO: 7272 - RNA, 32 nt, synthetic construct
  source 1..32: mol_type = other RNA; note = RTT
actgaagtcctttggcttcttttttgcactca

SEQ ID NO: 7273 - RNA, 33 nt, synthetic construct
  source 1..33: mol_type = other RNA; note = RTT
cactgaagtcctttggcttcttttttgcactca

SEQ ID NO: 7274 - RNA, 34 nt, synthetic construct
  source 1..34: mol_type = other RNA; note = RTT
acactgaagtcctttggcttcttttttgcactca

SEQ ID NO: 7275 - RNA, 35 nt, synthetic construct
  source 1..35: mol_type = other RNA; note = RTT
cacactgaagtcctttggcttcttttttgcactca

SEQ ID NO: 7276 - RNA, 36 nt, synthetic construct
  source 1..36: mol_type = other RNA; note = RTT
tcacactgaagtcctttggcttcttttttgcactca

SEQ ID NO: 7277 - RNA, 37 nt, synthetic construct
  source 1..37: mol_type = other RNA; note = RTT
gtcacactgaagtcctttggcttcttttttgcactca

SEQ ID NO: 7278 - RNA, 38 nt, synthetic construct
  source 1..38: mol_type = other RNA; note = RTT
tgtcacactgaagtcctttggcttcttttttgcactca

SEQ ID NO: 7279 - RNA, 39 nt, synthetic construct
  source 1..39: mol_type = other RNA; note = RTT
gtgtcacactgaagtcctttggcttcttttttgcactca

SEQ ID NO: 7280 - RNA, 40 nt, synthetic construct
  source 1..40: mol_type = other RNA; note = RTT
ggtgtcacactgaagtcctttggcttcttttttgcactca

SEQ ID NO: 7281-7285 - skipped (5 entries)

SEQ ID NO: 7286 - RNA, 10 nt, synthetic construct
  source 1..10: mol_type = other RNA; note = PBS
agtgaggatt

SEQ ID NO: 7287 - RNA, 11 nt, synthetic construct
  source 1..11: mol_type = other RNA; note = PBS
agtgaggattg

SEQ ID NO: 7288 - RNA, 12 nt, synthetic construct
  source 1..12: mol_type = other RNA; note = PBS
agtgaggattgc

SEQ ID NO: 7289 - RNA, 13 nt, synthetic construct
  source 1..13: mol_type = other RNA; note = PBS
agtgaggattgca

SEQ ID NO: 7290 - RNA, 14 nt, synthetic construct
  source 1..14: mol_type = other RNA; note = PBS
agtgaggattgcag

SEQ ID NO: 7291 - RNA, 15 nt, synthetic construct
  source 1..15: mol_type = other RNA; note = PBS
agtgaggattgcaga

SEQ ID NO: 7292 - RNA, 17 nt, synthetic construct
  source 1..17: mol_type = other RNA; note = PBS
agtgaggattgcagaat

SEQ ID NO: 7293 - RNA, 18 nt, synthetic construct
  source 1..18: mol_type = other RNA; note = PBS
agtgaggattgcagaatt

SEQ ID NO: 7294 - RNA, 19 nt, synthetic construct
  source 1..19: mol_type = other RNA; note = PBS
agtgaggattgcagaattt

SEQ ID NO: 7295 - RNA, 13 nt, synthetic construct
  source 1..13: mol_type = other RNA; note = RTT*1,2,4,8,12,15
tcacactgcccag

SEQ ID NO: 7296 - RNA, 14 nt, synthetic construct
  source 1..14: mol_type = other RNA; note = RTT*1,2,4,8,12,15
ctcacactgcccag

SEQ ID NO: 7297 - RNA, 15 nt, synthetic construct
  source 1..15: mol_type = other RNA; note = RTT*1,2,4,8,12,15
actcacactgcccag

SEQ ID NO: 7298 - RNA, 16 nt, synthetic construct
  source 1..16: mol_type = other RNA; note = RTT*1,3,7,11 (GG-to-GT PAM silencing edit)
cactcacactgaccag

SEQ ID NO: 7299 - RNA, 16 nt, synthetic construct
  source 1..16: mol_type = other RNA; note = RTT*1,2,4,8,12,15
cactcacactgcccag

SEQ ID NO: 7300 - RNA, 16 nt, synthetic construct
  source 1..16: mol_type = other RNA; note = RTT*1,5,9,13 (GG-to-GC PAM silencing edit)
cactcacactggccag

SEQ ID NO: 7301 - RNA, 16 nt, synthetic construct
  source 1..16: mol_type = other RNA; note = RTT*1,6,10,14 (GG-to-GA PAM silencing edit)
cactcacactgtccag

SEQ ID NO: 7302 - RNA, 17 nt, synthetic construct
  source 1..17: mol_type = other RNA; note = RTT*1,3,7,11 (GG-to-GT PAM silencing edit)
gcactcacactgaccag

SEQ ID NO: 7303 - RNA, 17 nt, synthetic construct
  source 1..17: mol_type = other RNA; note = RTT*1,5,9,13 (GG-to-GC PAM silencing edit)
gcactcacactggccag

SEQ ID NO: 7304 - RNA, 17 nt, synthetic construct
  source 1..17: mol_type = other RNA; note = RTT*1,6,10,14 (GG-to-GA PAM silencing edit)
gcactcacactgtccag

SEQ ID NO: 7305 - RNA, 18 nt, synthetic construct
  source 1..18: mol_type = other RNA; note = RTT*1,3,7,11 (GG-to-GT PAM silencing edit)
tgcactcacactgaccag

SEQ ID NO: 7306 - RNA, 18 nt, synthetic construct
  source 1..18: mol_type = other RNA; note = RTT*1,5,9,13 (GG-to-GC PAM silencing edit)
tgcactcacactggccag

SEQ ID NO: 7307 - RNA, 18 nt, synthetic construct
  source 1..18: mol_type = other RNA; note = RTT*1,6,10,14 (GG-to-GA PAM silencing edit)
tgcactcacactgtccag

SEQ ID NO: 7308 - RNA, 19 nt, synthetic construct
  source 1..19: mol_type = other RNA; note = RTT*1,3,7,11 (GG-to-GT PAM silencing edit)
ttgcactcacactgaccag

SEQ ID NO: 7309 - RNA, 19 nt, synthetic construct
  source 1..19: mol_type = other RNA; note = RTT*1,5,9,13 (GG-to-GC PAM silencing edit)
ttgcactcacactggccag

SEQ ID NO: 7310 - RNA, 19 nt, synthetic construct
  source 1..19: mol_type = other RNA; note = RTT*1,6,10,14 (GG-to-GA PAM silencing edit)
ttgcactcacactgtccag

SEQ ID NO: 7311 - RNA, 20 nt, synthetic construct
  source 1..20: mol_type = other RNA; note = RTT*1,3,7,11 (GG-to-GT PAM silencing edit)
tttgcactcacactgaccag

SEQ ID NO: 7312 - RNA, 20 nt, synthetic construct
  source 1..20: mol_type = other RNA; note = RTT*1,5,9,13 (GG-to-GC PAM silencing edit)
tttgcactcacactggccag

SEQ ID NO: 7313 - RNA, 20 nt, synthetic construct
  source 1..20: mol_type = other RNA; note = RTT*1,6,10,14 (GG-to-GA PAM silencing edit)
tttgcactcacactgtccag

SEQ ID NO: 7314 - RNA, 21 nt, synthetic construct
  source 1..21: mol_type = other RNA; note = RTT*1,3,7,11 (GG-to-GT PAM silencing edit)
ttttgcactcacactgaccag

SEQ ID NO: 7315 - RNA, 21 nt, synthetic construct
  source 1..21: mol_type = other RNA; note = RTT*1,5,9,13 (GG-to-GC PAM silencing edit)
ttttgcactcacactggccag

SEQ ID NO: 7316 - RNA, 21 nt, synthetic construct
  source 1..21: mol_type = other RNA; note = RTT*1,6,10,14 (GG-to-GA PAM silencing edit)
ttttgcactcacactgtccag

SEQ ID NO: 7317 - RNA, 22 nt, synthetic construct
  source 1..22: mol_type = other RNA; note = RTT*1,3,7,11 (GG-to-GT PAM silencing edit)
tttttgcactcacactgaccag

SEQ ID NO: 7318 - RNA, 22 nt, synthetic construct
  source 1..22: mol_type = other RNA; note = RTT*1,5,9,13 (GG-to-GC PAM silencing edit)
tttttgcactcacactggccag

SEQ ID NO: 7319 - RNA, 22 nt, synthetic construct
  source 1..22: mol_type = other RNA; note = RTT*1,6,10,14 (GG-to-GA PAM silencing edit)
tttttgcactcacactgtccag

SEQ ID NO: 7320 - RNA, 23 nt, synthetic construct
  source 1..23: mol_type = other RNA; note = RTT*1,3,7,11 (GG-to-GT PAM silencing edit)
ttttttgcactcacactgaccag

SEQ ID NO: 7321 - RNA, 23 nt, synthetic construct
  source 1..23: mol_type = other RNA; note = RTT*1,2,4,8,12,15
ttttttgcactcacactgcccag

SEQ ID NO: 7322 - RNA, 23 nt, synthetic construct
  source 1..23: mol_type = other RNA; note = RTT*1,5,9,13 (GG-to-GC PAM silencing edit)
ttttttgcactcacactggccag

SEQ ID NO: 7323 - RNA, 23 nt, synthetic construct
  source 1..23: mol_type = other RNA; note = RTT*1,6,10,14 (GG-to-GA PAM silencing edit)
ttttttgcactcacactgtccag

SEQ ID NO: 7324 - RNA, 24 nt, synthetic construct
  source 1..24: mol_type = other RNA; note = RTT*1,3,7,11 (GG-to-GT PAM silencing edit)
cttttttgcactcacactgaccag

SEQ ID NO: 7325 - RNA, 24 nt, synthetic construct
  source 1..24: mol_type = other RNA; note = RTT*1,2,4,8,12,15
cttttttgcactcacactgcccag

SEQ ID NO: 7326 - RNA, 24 nt, synthetic construct
  source 1..24: mol_type = other RNA; note = RTT*1,5,9,13 (GG-to-GC PAM silencing edit)
cttttttgcactcacactggccag

SEQ ID NO: 7327 - RNA, 24 nt, synthetic construct
  source 1..24: mol_type = other RNA; note = RTT*1,6,10,14 (GG-to-GA PAM silencing edit)
cttttttgcactcacactgtccag

SEQ ID NO: 7328 - RNA, 25 nt, synthetic construct
  source 1..25: mol_type = other RNA; note = RTT*1,3,7,11 (GG-to-GT PAM silencing edit)
tcttttttgcactcacactgaccag

SEQ ID NO: 7329 - RNA, 25 nt, synthetic construct
  source 1..25: mol_type = other RNA; note = RTT*1,2,4,8,12,15
tcttttttgcactcacactgcccag

SEQ ID NO: 7330 - RNA, 25 nt, synthetic construct
  source 1..25: mol_type = other RNA; note = RTT*1,5,9,13 (GG-to-GC PAM silencing edit)
tcttttttgcactcacactggccag

SEQ ID NO: 7331 - RNA, 25 nt, synthetic construct
  source 1..25: mol_type = other RNA; note = RTT*1,6,10,14 (GG-to-GA PAM silencing edit)
tcttttttgcactcacactgtccag

SEQ ID NO: 7332 - RNA, 26 nt, synthetic construct
  source 1..26: mol_type = other RNA; note = RTT*1,3,7,11 (GG-to-GT PAM silencing edit)
ttcttttttgcactcacactgaccag

SEQ ID NO: 7333 - RNA, 26 nt, synthetic construct
  source 1..26: mol_type = other RNA; note = RTT*1,2,4,8,12,15
ttcttttttgcactcacactgcccag

SEQ ID NO: 7334 - RNA, 26 nt, synthetic construct
  source 1..26: mol_type = other RNA; note = RTT*1,5,9,13 (GG-to-GC PAM silencing edit)
ttcttttttgcactcacactggccag

SEQ ID NO: 7335 - RNA, 26 nt, synthetic construct
  source 1..26: mol_type = other RNA; note = RTT*1,6,10,14 (GG-to-GA PAM silencing edit)
ttcttttttgcactcacactgtccag

SEQ ID NO: 7336 - RNA, 27 nt, synthetic construct
  source 1..27: mol_type = other RNA; note = RTT*1,3,7,11 (GG-to-GT PAM silencing edit)
cttcttttttgcactcacactgaccag

SEQ ID NO: 7337 - RNA, 27 nt, synthetic construct
  source 1..27: mol_type = other RNA; note = RTT*1,2,4,8,12,15
cttcttttttgcactcacactgcccag

SEQ ID NO: 7338 - RNA, 27 nt, synthetic construct
  source 1..27: mol_type = other RNA; note = RTT*1,5,9,13 (GG-to-GC PAM silencing edit)
cttcttttttgcactcacactggccag

SEQ ID NO: 7339 - RNA, 27 nt, synthetic construct
  source 1..27: mol_type = other RNA; note = RTT*1,6,10,14 (GG-to-GA PAM silencing edit)
cttcttttttgcactcacactgtccag

SEQ ID NO: 7340 - RNA, 28 nt, synthetic construct
  source 1..28: mol_type = other RNA; note = RTT*1,3,7,11 (GG-to-GT PAM silencing edit)
gcttcttttttgcactcacactgaccag

SEQ ID NO: 7341 - RNA, 28 nt, synthetic construct
  source 1..28: mol_type = other RNA; note = RTT*1,2,4,8,12,15
gcttcttttttgcactcacactgcccag

SEQ ID NO: 7342 - RNA, 28 nt, synthetic construct
  source 1..28: mol_type = other RNA; note = RTT*1,5,9,13 (GG-to-GC PAM silencing edit)
gcttcttttttgcactcacactggccag

SEQ ID NO: 7343 - RNA, 28 nt, synthetic construct
  source 1..28: mol_type = other RNA; note = RTT*1,6,10,14 (GG-to-GA PAM silencing edit)
gcttcttttttgcactcacactgtccag

SEQ ID NO: 7344 - RNA, 29 nt, synthetic construct
  source 1..29: mol_type = other RNA; note = RTT*1,3,7,11 (GG-to-GT PAM silencing edit)
ggcttcttttttgcactcacactgaccag

SEQ ID NO: 7345 - RNA, 29 nt, synthetic construct
  source 1..29: mol_type = other RNA; note = RTT*1,2,4,8,12,15
ggcttcttttttgcactcacactgcccag

SEQ ID NO: 7346 - RNA, 29 nt, synthetic construct
  source 1..29: mol_type = other RNA; note = RTT*1,5,9,13 (GG-to-GC PAM silencing edit)
ggcttcttttttgcactcacactggccag

SEQ ID NO: 7347 - RNA, 29 nt, synthetic construct
  source 1..29: mol_type = other RNA; note = RTT*1,6,10,14 (GG-to-GA PAM silencing edit)
ggcttcttttttgcactcacactgtccag

SEQ ID NO: 7348 - RNA, 30 nt, synthetic construct
  source 1..30: mol_type = other RNA; note = RTT*1,3,7,11 (GG-to-GT PAM silencing edit)
tggcttcttttttgcactcacactgaccag

SEQ ID NO: 7349 - RNA, 30 nt, synthetic construct
  source 1..30: mol_type = other RNA; note = RTT*1,2,4,8,12,15
tggcttcttttttgcactcacactgcccag

SEQ ID NO: 7350 - RNA, 30 nt, synthetic construct
  source 1..30: mol_type = other RNA; note = RTT*1,5,9,13 (GG-to-GC PAM silencing edit)
tggcttcttttttgcactcacactggccag

SEQ ID NO: 7351 - RNA, 30 nt, synthetic construct
  source 1..30: mol_type = other RNA; note = RTT*1,6,10,14 (GG-to-GA PAM silencing edit)
tggcttcttttttgcactcacactgtccag

SEQ ID NO: 7352 - RNA, 31 nt, synthetic construct
  source 1..31: mol_type = other RNA; note = RTT*1,3,7,11 (GG-to-GT PAM silencing edit)
ttggcttcttttttgcactcacactgaccag

SEQ ID NO: 7353 - RNA, 31 nt, synthetic construct
  source 1..31: mol_type = other RNA; note = RTT*1,2,4,8,12,15
ttggcttcttttttgcactcacactgcccag

SEQ ID NO: 7354 - RNA, 31 nt, synthetic construct
  source 1..31: mol_type = other RNA; note = RTT*1,5,9,13 (GG-to-GC PAM silencing edit)
ttggcttcttttttgcactcacactggccag

SEQ ID NO: 7355 - RNA, 31 nt, synthetic construct
  source 1..31: mol_type = other RNA; note = RTT*1,6,10,14 (GG-to-GA PAM silencing edit)
ttggcttcttttttgcactcacactgtccag

SEQ ID NO: 7356 - RNA, 32 nt, synthetic construct
  source 1..32: mol_type = other RNA; note = RTT*1,3,7,11 (GG-to-GT PAM silencing edit)
tttggcttcttttttgcactcacactgaccag

SEQ ID NO: 7357 - RNA, 32 nt, synthetic construct
  source 1..32: mol_type = other RNA; note = RTT*1,2,4,8,12,15
tttggcttcttttttgcactcacactgcccag

SEQ ID NO: 7358 - RNA, 32 nt, synthetic construct
  source 1..32: mol_type = other RNA; note = RTT*1,5,9,13 (GG-to-GC PAM silencing edit)
tttggcttcttttttgcactcacactggccag

SEQ ID NO: 7359 - RNA, 32 nt, synthetic construct
  source 1..32: mol_type = other RNA; note = RTT*1,6,10,14 (GG-to-GA PAM silencing edit)
tttggcttcttttttgcactcacactgtccag

SEQ ID NO: 7360 - RNA, 33 nt, synthetic construct
  source 1..33: mol_type = other RNA; note = RTT*1,3,7,11 (GG-to-GT PAM silencing edit)
ctttggcttcttttttgcactcacactgaccag

SEQ ID NO: 7361 - RNA, 33 nt, synthetic construct
  source 1..33: mol_type = other RNA; note = RTT*1,2,4,8,12,15
ctttggcttcttttttgcactcacactgcccag

SEQ ID NO: 7362 - RNA, 33 nt, synthetic construct
  source 1..33: mol_type = other RNA; note = RTT*1,5,9,13 (GG-to-GC PAM silencing edit)
ctttggcttcttttttgcactcacactggccag

SEQ ID NO: 7363 - RNA, 33 nt, synthetic construct
  source 1..33: mol_type = other RNA; note = RTT*1,6,10,14 (GG-to-GA PAM silencing edit)
ctttggcttcttttttgcactcacactgtccag

SEQ ID NO: 7364 - RNA, 34 nt, synthetic construct
  source 1..34: mol_type = other RNA; note = RTT*1,3,7,11 (GG-to-GT PAM silencing edit)
cctttggcttcttttttgcactcacactgaccag

SEQ ID NO: 7365 - RNA, 34 nt, synthetic construct
  source 1..34: mol_type = other RNA; note = RTT*1,2,4,8,12,15
cctttggcttcttttttgcactcacactgcccag

SEQ ID NO: 7366 - RNA, 34 nt, synthetic construct
  source 1..34: mol_type = other RNA; note = RTT*1,5,9,13 (GG-to-GC PAM silencing edit)
cctttggcttcttttttgcactcacactggccag

SEQ ID NO: 7367 - RNA, 34 nt, synthetic construct
  source 1..34: mol_type = other RNA; note = RTT*1,6,10,14 (GG-to-GA PAM silencing edit)
cctttggcttcttttttgcactcacactgtccag

SEQ ID NO: 7368 - RNA, 35 nt, synthetic construct
  source 1..35: mol_type = other RNA; note = RTT*1,3,7,11 (GG-to-GT PAM silencing edit)
tcctttggcttcttttttgcactcacactgaccag

SEQ ID NO: 7369 - RNA, 35 nt, synthetic construct
  source 1..35: mol_type = other RNA; note = RTT*1,2,4,8,12,15
tcctttggcttcttttttgcactcacactgcccag

SEQ ID NO: 7370 - RNA, 35 nt, synthetic construct
  source 1..35: mol_type = other RNA; note = RTT*1,5,9,13 (GG-to-GC PAM silencing edit)
tcctttggcttcttttttgcactcacactggccag

SEQ ID NO: 7371 - RNA, 35 nt, synthetic construct
  source 1..35: mol_type = other RNA; note = RTT*1,6,10,14 (GG-to-GA PAM silencing edit)
tcctttggcttcttttttgcactcacactgtccag

SEQ ID NO: 7372 - RNA, 36 nt, synthetic construct
  source 1..36: mol_type = other RNA; note = RTT*1,3,7,11 (GG-to-GT PAM silencing edit)
gtcctttggcttcttttttgcactcacactgaccag

SEQ ID NO: 7373 - RNA, 36 nt, synthetic construct
  source 1..36: mol_type = other RNA; note = RTT*1,2,4,8,12,15
gtcctttggcttcttttttgcactcacactgcccag

SEQ ID NO: 7374 - RNA, 36 nt, synthetic construct
  source 1..36: mol_type = other RNA; note = RTT*1,5,9,13 (GG-to-GC PAM silencing edit)
gtcctttggcttcttttttgcactcacactggccag

SEQ ID NO: 7375 - RNA, 36 nt, synthetic construct
  source 1..36: mol_type = other RNA; note = RTT*1,6,10,14 (GG-to-GA PAM silencing edit)
gtcctttggcttcttttttgcactcacactgtccag

SEQ ID NO: 7376 - RNA, 37 nt, synthetic construct
  source 1..37: mol_type = other RNA; note = RTT*1,3,7,11 (GG-to-GT PAM silencing edit)
agtcctttggcttcttttttgcactcacactgaccag

SEQ ID NO: 7377 - RNA, 37 nt, synthetic construct
  source 1..37: mol_type = other RNA; note = RTT*1,2,4,8,12,15
agtcctttggcttcttttttgcactcacactgcccag

SEQ ID NO: 7378 - RNA, 37 nt, synthetic construct
  source 1..37: mol_type = other RNA; note = RTT*1,5,9,13 (GG-to-GC PAM silencing edit)
agtcctttggcttcttttttgcactcacactggccag

SEQ ID NO: 7379 - RNA, 37 nt, synthetic construct
  source 1..37: mol_type = other RNA; note = RTT*1,6,10,14 (GG-to-GA PAM silencing edit)
agtcctttggcttcttttttgcactcacactgtccag

SEQ ID NO: 7380 - RNA, 38 nt, synthetic construct
  source 1..38: mol_type = other RNA; note = RTT*1,3,7,11 (GG-to-GT PAM silencing edit)
aagtcctttggcttcttttttgcactcacactgaccag

SEQ ID NO: 7381 - RNA, 38 nt, synthetic construct
  source 1..38: mol_type = other RNA; note = RTT*1,2,4,8,12,15
aagtcctttggcttcttttttgcactcacactgcccag

SEQ ID NO: 7382 - RNA, 38 nt, synthetic construct
  source 1..38: mol_type = other RNA; note = RTT*1,5,9,13 (GG-to-GC PAM silencing edit)
aagtcctttggcttcttttttgcactcacactggccag

SEQ ID NO: 7383 - RNA, 38 nt, synthetic construct
  source 1..38: mol_type = other RNA; note = RTT*1,6,10,14 (GG-to-GA PAM silencing edit)
aagtcctttggcttcttttttgcactcacactgtccag

SEQ ID NO: 7384 - RNA, 39 nt, synthetic construct
  source 1..39: mol_type = other RNA; note = RTT*1,3,7,11 (GG-to-GT PAM silencing edit)
gaagtcctttggcttcttttttgcactcacactgaccag

SEQ ID NO: 7385 - RNA, 39 nt, synthetic construct
  source 1..39: mol_type = other RNA; note = RTT*1,2,4,8,12,15
gaagtcctttggcttcttttttgcactcacactgcccag

SEQ ID NO: 7386 - RNA, 39 nt, synthetic construct
  source 1..39: mol_type = other RNA; note = RTT*1,5,9,13 (GG-to-GC PAM silencing edit)
gaagtcctttggcttcttttttgcactcacactggccag

SEQ ID NO: 7387 - RNA, 39 nt, synthetic construct
  source 1..39: mol_type = other RNA; note = RTT*1,6,10,14 (GG-to-GA PAM silencing edit)
gaagtcctttggcttcttttttgcactcacactgtccag

SEQ ID NO: 7388 - RNA, 40 nt, synthetic construct
  source 1..40: mol_type = other RNA; note = RTT*1,3,7,11 (GG-to-GT PAM silencing edit)
tgaagtcctttggcttcttttttgcactcacactgaccag

SEQ ID NO: 7389 - RNA, 40 nt, synthetic construct
  source 1..40: mol_type = other RNA; note = RTT*1,2,4,8,12,15
tgaagtcctttggcttcttttttgcactcacactgcccag

SEQ ID NO: 7390 - RNA, 40 nt, synthetic construct
  source 1..40: mol_type = other RNA; note = RTT*1,5,9,13 (GG-to-GC PAM silencing edit)
tgaagtcctttggcttcttttttgcactcacactggccag

SEQ ID NO: 7391 - RNA, 40 nt, synthetic construct
  source 1..40: mol_type = other RNA; note = RTT*1,6,10,14 (GG-to-GA PAM silencing edit)
tgaagtcctttggcttcttttttgcactcacactgtccag

SEQ ID NO: 7392 - RNA, 20 nt, synthetic construct
  source 1..20: mol_type = other RNA; note = PE3b*11 ngRNA spacer (AG PAM)
tttttgcactcacactgacc

SEQ ID NO: 7393 - RNA, 20 nt, synthetic construct
  source 1..20: mol_type = other RNA; note = PE3b*13 ngRNA spacer (AG PAM)
tttttgcactcacactggcc

SEQ ID NO: 7394 - RNA, 20 nt, synthetic construct
  source 1..20: mol_type = other RNA; note = PE3b*14 ngRNA spacer (AG PAM)
tttttgcactcacactgtcc

SEQ ID NO: 7395-7399 - skipped (5 entries)

SEQ ID NO: 7400 - RNA, 10 nt, synthetic construct
  source 1..10: mol_type = other RNA; note = PBS
ctgcccagag

SEQ ID NO: 7401 - RNA, 11 nt, synthetic construct
  source 1..11: mol_type = other RNA; note = PBS
ctgcccagagt

SEQ ID NO: 7402 - RNA, 12 nt, synthetic construct
  source 1..12: mol_type = other RNA; note = PBS
ctgcccagagtg

SEQ ID NO: 7403 - RNA, 13 nt, synthetic construct
  source 1..13: mol_type = other RNA; note = PBS
ctgcccagagtga

SEQ ID NO: 7404 - RNA, 14 nt, synthetic construct
  source 1..14: mol_type = other RNA; note = PBS
ctgcccagagtgag

SEQ ID NO: 7405 - RNA, 15 nt, synthetic construct
  source 1..15: mol_type = other RNA; note = PBS
ctgcccagagtgagg

SEQ ID NO: 7406 - RNA, 16 nt, synthetic construct
  source 1..16: mol_type = other RNA; note = PBS
ctgcccagagtgagga

SEQ ID NO: 7407 - RNA, 18 nt, synthetic construct
  source 1..18: mol_type = other RNA; note = PBS
ctgcccagagtgaggatt

SEQ ID NO: 7408 - RNA, 18 nt, synthetic construct
  source 1..18: mol_type = other RNA; note = PEgRNA spacer (AG PAM)
cctcactctgggcagtgt

SEQ ID NO: 7409 - RNA, 20 nt, synthetic construct
  source 1..20: mol_type = other RNA; note = PEgRNA spacer (AG PAM)
atcctcactctgggcagtgt

SEQ ID NO: 7410 - RNA, 21 nt, synthetic construct
  source 1..21: mol_type = other RNA; note = PEgRNA spacer (AG PAM)
aatcctcactctgggcagtgt

SEQ ID NO: 7411 - RNA, 22 nt, synthetic construct
  source 1..22: mol_type = other RNA; note = PEgRNA spacer (AG PAM)
caatcctcactctgggcagtgt

SEQ ID NO: 7412-7413 - skipped (2 entries)

SEQ ID NO: 7414 - RNA, 10 nt, synthetic construct
  source 1..10: mol_type = other RNA; note = RTT
tgcactcaca

SEQ ID NO: 7415 - RNA, 11 nt, synthetic construct
  source 1..11: mol_type = other RNA; note = RTT
ttgcactcaca

SEQ ID NO: 7416 - RNA, 12 nt, synthetic construct
  source 1..12: mol_type = other RNA; note = RTT
tttgcactcaca

SEQ ID NO: 7417 - RNA, 13 nt, synthetic construct
  source 1..13: mol_type = other RNA; note = RTT
ttttgcactcaca

SEQ ID NO: 7418 - RNA, 14 nt, synthetic construct
  source 1..14: mol_type = other RNA; note = RTT
tttttgcactcaca

SEQ ID NO: 7419 - RNA, 15 nt, synthetic construct
  source 1..15: mol_type = other RNA; note = RTT
ttttttgcactcaca

SEQ ID NO: 7420 - RNA, 16 nt, synthetic construct
  source 1..16: mol_type = other RNA; note = RTT
cttttttgcactcaca

SEQ ID NO: 7421 - RNA, 17 nt, synthetic construct
  source 1..17: mol_type = other RNA; note = RTT
tcttttttgcactcaca

SEQ ID NO: 7422 - RNA, 18 nt, synthetic construct
  source 1..18: mol_type = other RNA; note = RTT
ttcttttttgcactcaca

SEQ ID NO: 7423 - RNA, 19 nt, synthetic construct
  source 1..19: mol_type = other RNA; note = RTT
cttcttttttgcactcaca

SEQ ID NO: 7424 - RNA, 20 nt, synthetic construct
  source 1..20: mol_type = other RNA; note = RTT
gcttcttttttgcactcaca

SEQ ID NO: 7425 - RNA, 21 nt, synthetic construct
  source 1..21: mol_type = other RNA; note = RTT
ggcttcttttttgcactcaca

SEQ ID NO: 7426 - RNA, 22 nt, synthetic construct
  source 1..22: mol_type = other RNA; note = RTT
tggcttcttttttgcactcaca

SEQ ID NO: 7427 - RNA, 23 nt, synthetic construct
  source 1..23: mol_type = other RNA; note = RTT
ttggcttcttttttgcactcaca

SEQ ID NO: 7428 - RNA, 24 nt, synthetic construct
  source 1..24: mol_type = other RNA; note = RTT
tttggcttcttttttgcactcaca

SEQ ID NO: 7429 - RNA, 25 nt, synthetic construct
  source 1..25: mol_type = other RNA; note = RTT
ctttggcttcttttttgcactcaca

SEQ ID NO: 7430 - RNA, 26 nt, synthetic construct
  source 1..26: mol_type = other RNA; note = RTT
cctttggcttcttttttgcactcaca

SEQ ID NO: 7431 - RNA, 27 nt, synthetic construct
  source 1..27: mol_type = other RNA; note = RTT
tcctttggcttcttttttgcactcaca

SEQ ID NO: 7432 - RNA, 28 nt, synthetic construct
  source 1..28: mol_type = other RNA; note = RTT
gtcctttggcttcttttttgcactcaca

SEQ ID NO: 7433 - RNA, 29 nt, synthetic construct
  source 1..29: mol_type = other RNA; note = RTT
agtcctttggcttcttttttgcactcaca

SEQ ID NO: 7434 - RNA, 30 nt, synthetic construct
  source 1..30: mol_type = other RNA; note = RTT
aagtcctttggcttcttttttgcactcaca

SEQ ID NO: 7435 - RNA, 31 nt, synthetic construct
  source 1..31: mol_type = other RNA; note = RTT
gaagtcctttggcttcttttttgcactcaca

SEQ ID NO: 7436 - RNA, 32 nt, synthetic construct
  source 1..32: mol_type = other RNA; note = RTT
tgaagtcctttggcttcttttttgcactcaca

SEQ ID NO: 7437 - RNA, 33 nt, synthetic construct
  source 1..33: mol_type = other RNA; note = RTT
ctgaagtcctttggcttcttttttgcactcaca

SEQ ID NO: 7438 - RNA, 34 nt, synthetic construct
  source 1..34: mol_type = other RNA; note = RTT
actgaagtcctttggcttcttttttgcactcaca

SEQ ID NO: 7439 - RNA, 35 nt, synthetic construct
  source 1..35: mol_type = other RNA; note = RTT
cactgaagtcctttggcttcttttttgcactcaca

SEQ ID NO: 7440 - RNA, 36 nt, synthetic construct
  source 1..36: mol_type = other RNA; note = RTT
acactgaagtcctttggcttcttttttgcactcaca

SEQ ID NO: 7441 - RNA, 37 nt, synthetic construct
  source 1..37: mol_type = other RNA; note = RTT
cacactgaagtcctttggcttcttttttgcactcaca

SEQ ID NO: 7442 - RNA, 38 nt, synthetic construct
  source 1..38: mol_type = other RNA; note = RTT
tcacactgaagtcctttggcttcttttttgcactcaca

SEQ ID NO: 7443 - RNA, 39 nt, synthetic construct
  source 1..39: mol_type = other RNA; note = RTT
gtcacactgaagtcctttggcttcttttttgcactcaca

SEQ ID NO: 7444 - RNA, 40 nt, synthetic construct
  source 1..40: mol_type = other RNA; note = RTT
tgtcacactgaagtcctttggcttcttttttgcactcaca

SEQ ID NO: 7445-7449 - skipped (5 entries)

SEQ ID NO: 7450 - RNA, 10 nt, synthetic construct
  source 1..10: mol_type = other RNA; note = PBS
cagagtgagg

SEQ ID NO: 7451 - RNA, 11 nt, synthetic construct
  source 1..11: mol_type = other RNA; note = PBS
cagagtgagga

SEQ ID NO: 7452 - RNA, 12 nt, synthetic construct
  source 1..12: mol_type = other RNA; note = PBS
cagagtgaggat

SEQ ID NO: 7453 - RNA, 13 nt, synthetic construct
  source 1..13: mol_type = other RNA; note = PBS
cagagtgaggatt

SEQ ID NO: 7454 - RNA, 14 nt, synthetic construct
  source 1..14: mol_type = other RNA; note = PBS
cagagtgaggattg

SEQ ID NO: 7455 - RNA, 15 nt, synthetic construct
  source 1..15: mol_type = other RNA; note = PBS
cagagtgaggattgc

SEQ ID NO: 7456 - RNA, 16 nt, synthetic construct
  source 1..16: mol_type = other RNA; note = PBS
cagagtgaggattgca

SEQ ID NO: 7457 - RNA, 17 nt, synthetic construct
  source 1..17: mol_type = other RNA; note = PBS
cagagtgaggattgcag

SEQ ID NO: 7458 - RNA, 18 nt, synthetic construct
  source 1..18: mol_type = other RNA; note = PBS
cagagtgaggattgcaga

SEQ ID NO: 7459 - RNA, 17 nt, synthetic construct
  source 1..17: mol_type = other RNA; note = PEgRNA spacer (AG PAM)
caatcctcactctgggc

SEQ ID NO: 7460 - RNA, 18 nt, synthetic construct
  source 1..18: mol_type = other RNA; note = PEgRNA spacer (AG PAM)
gcaatcctcactctgggc

SEQ ID NO: 7461 - RNA, 10 nt, synthetic construct
  source 1..10: mol_type = other RNA; note = RTT*1,3,5
tcacactgcc

SEQ ID NO: 7462 - RNA, 11 nt, synthetic construct
  source 1..11: mol_type = other RNA; note = RTT*1,3,5
ctcacactgcc

SEQ ID NO: 7463 - RNA, 12 nt, synthetic construct
  source 1..12: mol_type = other RNA; note = RTT*1,3,5
actcacactgcc

SEQ ID NO: 7464 - RNA, 13 nt, synthetic construct
  source 1..13: mol_type = other RNA; note = RTT*1,3,5
cactcacactgcc

SEQ ID NO: 7465 - RNA, 13 nt, synthetic construct
  source 1..13: mol_type = other RNA; note = RTT*2,4,6 (AG-to-AA PAM silencing edit)
cactcacattgcc

SEQ ID NO: 7466 - RNA, 14 nt, synthetic construct
  source 1..14: mol_type = other RNA; note = RTT*1,3,5
gcactcacactgcc

SEQ ID NO: 7467 - RNA, 14 nt, synthetic construct
  source 1..14: mol_type = other RNA; note = RTT*2,4,6 (AG-to-AA PAM silencing edit)
gcactcacattgcc

SEQ ID NO: 7468 - RNA, 15 nt, synthetic construct
  source 1..15: mol_type = other RNA; note = RTT*1,3,5
tgcactcacactgcc

SEQ ID NO: 7469 - RNA, 15 nt, synthetic construct
  source 1..15: mol_type = other RNA; note = RTT*2,4,6 (AG-to-AA PAM silencing edit)
tgcactcacattgcc

SEQ ID NO: 7470 - RNA, 16 nt, synthetic construct
  source 1..16: mol_type = other RNA; note = RTT*1,3,5
ttgcactcacactgcc

SEQ ID NO: 7471 - RNA, 16 nt, synthetic construct
  source 1..16: mol_type = other RNA; note = RTT*2,4,6 (AG-to-AA PAM silencing edit)
ttgcactcacattgcc

SEQ ID NO: 7472 - RNA, 17 nt, synthetic construct
  source 1..17: mol_type = other RNA; note = RTT*2,4,6 (AG-to-AA PAM silencing edit)
tttgcactcacattgcc

SEQ ID NO: 7473 - RNA, 18 nt, synthetic construct
  source 1..18: mol_type = other RNA; note = RTT*2,4,6 (AG-to-AA PAM silencing edit)
ttttgcactcacattgcc

SEQ ID NO: 7474 - RNA, 19 nt, synthetic construct
  source 1..19: mol_type = other RNA; note = RTT*2,4,6 (AG-to-AA PAM silencing edit)
tttttgcactcacattgcc

SEQ ID NO: 7475 - RNA, 21 nt, synthetic construct
  source 1..21: mol_type = other RNA; note = RTT*2,4,6 (AG-to-AA PAM silencing edit)
cttttttgcactcacattgcc

SEQ ID NO: 7476 - RNA, 22 nt, synthetic construct
  source 1..22: mol_type = other RNA; note = RTT*2,4,6 (AG-to-AA PAM silencing edit)
tcttttttgcactcacattgcc

SEQ ID NO: 7477 - RNA, 23 nt, synthetic construct
  source 1..23: mol_type = other RNA; note = RTT*1,3,5
ttcttttttgcactcacactgcc

SEQ ID NO: 7478 - RNA, 23 nt, synthetic construct
  source 1..23: mol_type = other RNA; note = RTT*2,4,6 (AG-to-AA PAM silencing edit)
ttcttttttgcactcacattgcc

SEQ ID NO: 7479 - RNA, 24 nt, synthetic construct
  source 1..24: mol_type = other RNA; note = RTT*1,3,5
cttcttttttgcactcacactgcc

SEQ ID NO: 7480 - RNA, 24 nt, synthetic construct
  source 1..24: mol_type = other RNA; note = RTT*2,4,6 (AG-to-AA PAM silencing edit)
cttcttttttgcactcacattgcc

SEQ ID NO: 7481 - RNA, 25 nt, synthetic construct
  source 1..25: mol_type = other RNA; note = RTT*1,3,5
gcttcttttttgcactcacactgcc

SEQ ID NO: 7482 - RNA, 25 nt, synthetic construct
  source 1..25: mol_type = other RNA; note = RTT*2,4,6 (AG-to-AA PAM silencing edit)
gcttcttttttgcactcacattgcc

SEQ ID NO: 7483 - RNA, 26 nt, synthetic construct
  source 1..26: mol_type = other RNA; note = RTT*1,3,5
ggcttcttttttgcactcacactgcc

SEQ ID NO: 7484 - RNA, 26 nt, synthetic construct
  source 1..26: mol_type = other RNA; note = RTT*2,4,6 (AG-to-AA PAM silencing edit)
ggcttcttttttgcactcacattgcc

SEQ ID NO: 7485 - RNA, 27 nt, synthetic construct
  source 1..27: mol_type = other RNA; note = RTT*1,3,5
tggcttcttttttgcactcacactgcc

SEQ ID NO: 7486 - RNA, 27 nt, synthetic construct
  source 1..27: mol_type = other RNA; note = RTT*2,4,6 (AG-to-AA PAM silencing edit)
tggcttcttttttgcactcacattgcc

SEQ ID NO: 7487 - RNA, 28 nt, synthetic construct
  source 1..28: mol_type = other RNA; note = RTT*1,3,5
ttggcttcttttttgcactcacactgcc

SEQ ID NO: 7488 - RNA, 28 nt, synthetic construct
  source 1..28: mol_type = other RNA; note = RTT*2,4,6 (AG-to-AA PAM silencing edit)
ttggcttcttttttgcactcacattgcc

SEQ ID NO: 7489 - RNA, 29 nt, synthetic construct
  source 1..29: mol_type = other RNA; note = RTT*1,3,5
tttggcttcttttttgcactcacactgcc

SEQ ID NO: 7490 - RNA, 29 nt, synthetic construct
  source 1..29: mol_type = other RNA; note = RTT*2,4,6 (AG-to-AA PAM silencing edit)
tttggcttcttttttgcactcacattgcc

SEQ ID NO: 7491 - RNA, 30 nt, synthetic construct
  source 1..30: mol_type = other RNA; note = RTT*1,3,5
ctttggcttcttttttgcactcacactgcc

SEQ ID NO: 7492 - RNA, 30 nt, synthetic construct
  source 1..30: mol_type = other RNA; note = RTT*2,4,6 (AG-to-AA PAM silencing edit)
ctttggcttcttttttgcactcacattgcc

SEQ ID NO: 7493 - RNA, 31 nt, synthetic construct
  source 1..31: mol_type = other RNA; note = RTT*1,3,5
cctttggcttcttttttgcactcacactgcc

SEQ ID NO: 7494 - RNA, 31 nt, synthetic construct
  source 1..31: mol_type = other RNA; note = RTT*2,4,6 (AG-to-AA PAM silencing edit)
cctttggcttcttttttgcactcacattgcc

SEQ ID NO: 7495 - RNA, 32 nt, synthetic construct
  source 1..32: mol_type = other RNA; note = RTT*1,3,5
tcctttggcttcttttttgcactcacactgcc

SEQ ID NO: 7496 - RNA, 32 nt, synthetic construct
  source 1..32: mol_type = other RNA; note = RTT*2,4,6 (AG-to-AA PAM silencing edit)
tcctttggcttcttttttgcactcacattgcc

SEQ ID NO: 7497 - RNA, 33 nt, synthetic construct
  source 1..33: mol_type = other RNA; note = RTT*1,3,5
gtcctttggcttcttttttgcactcacactgcc

SEQ ID NO: 7498 - RNA, 33 nt, synthetic construct
  source 1..33: mol_type = other RNA; note = RTT*2,4,6 (AG-to-AA PAM silencing edit)
gtcctttggcttcttttttgcactcacattgcc

SEQ ID NO: 7499 - RNA, 34 nt, synthetic construct
  source 1..34: mol_type = other RNA; note = RTT*1,3,5
agtcctttggcttcttttttgcactcacactgcc

SEQ ID NO: 7500 - RNA, 34 nt, synthetic construct
  source 1..34: mol_type = other RNA; note = RTT*2,4,6 (AG-to-AA PAM silencing edit)
agtcctttggcttcttttttgcactcacattgcc

SEQ ID NO: 7501 - RNA, 35 nt, synthetic construct
  source 1..35: mol_type = other RNA; note = RTT*1,3,5
aagtcctttggcttcttttttgcactcacactgcc

SEQ ID NO: 7502 - RNA, 35 nt, synthetic construct
  source 1..35: mol_type = other RNA; note = RTT*2,4,6 (AG-to-AA PAM silencing edit)
aagtcctttggcttcttttttgcactcacattgcc

SEQ ID NO: 7503 - RNA, 36 nt, synthetic construct
  source 1..36: mol_type = other RNA; note = RTT*1,3,5
gaagtcctttggcttcttttttgcactcacactgcc

SEQ ID NO: 7504 - RNA, 36 nt, synthetic construct
  source 1..36: mol_type = other RNA; note = RTT*2,4,6 (AG-to-AA PAM silencing edit)
gaagtcctttggcttcttttttgcactcacattgcc

SEQ ID NO: 7505 - RNA, 37 nt, synthetic construct
  source 1..37: mol_type = other RNA; note = RTT*1,3,5
tgaagtcctttggcttcttttttgcactcacactgcc

SEQ ID NO: 7506 - RNA, 37 nt, synthetic construct
  source 1..37: mol_type = other RNA; note = RTT*2,4,6 (AG-to-AA PAM silencing edit)
tgaagtcctttggcttcttttttgcactcacattgcc

SEQ ID NO: 7507 - RNA, 38 nt, synthetic construct
  source 1..38: mol_type = other RNA; note = RTT*1,3,5
ctgaagtcctttggcttcttttttgcactcacactgcc

SEQ ID NO: 7508 - RNA, 38 nt, synthetic construct
  source 1..38: mol_type = other RNA; note = RTT*2,4,6 (AG-to-AA PAM silencing edit)
ctgaagtcctttggcttcttttttgcactcacattgcc

SEQ ID NO: 7509 - RNA, 39 nt, synthetic construct
  source 1..39: mol_type = other RNA; note = RTT*1,3,5
actgaagtcctttggcttcttttttgcactcacactgcc

SEQ ID NO: 7510 - RNA, 39 nt, synthetic construct
  source 1..39: mol_type = other RNA; note = RTT*2,4,6 (AG-to-AA PAM silencing edit)
actgaagtcctttggcttcttttttgcactcacattgcc

SEQ ID NO: 7511 - RNA, 40 nt, synthetic construct
  source 1..40: mol_type = other RNA; note = RTT*1,3,5
cactgaagtcctttggcttcttttttgcactcacactgcc

SEQ ID NO: 7512 - RNA, 40 nt, synthetic construct
  source 1..40: mol_type = other RNA; note = RTT*2,4,6 (AG-to-AA PAM silencing edit)
cactgaagtcctttggcttcttttttgcactcacattgcc

SEQ ID NO: 7513 - RNA, 20 nt, synthetic construct
  source 1..20: mol_type = other RNA; note = PE3b*2 ngRNA spacer (TG PAM)
cttcttttttgcactcacat

SEQ ID NO: 7514 - RNA, 20 nt, synthetic construct
  source 1..20: mol_type = other RNA; note = PE3b*4 ngRNA spacer (AG PAM)
tttgcactcacattgcccag

SEQ ID NO: 7515 - RNA, 133 nt, synthetic construct
  source 1..133: mol_type = other RNA; note = PEgRNA
ccctgccagtgtaacctccagttttagagctagaaatagcaagttaaaataaggctagtccgttatcaacttgaaaaagtggcaccgagtcggtgcattgcagaatttgttcactgagccatggaggttacac

SEQ ID NO: 7516 - RNA, 135 nt, synthetic construct
  source 1..135: mol_type = other RNA; note = PEgRNA
ccctgccagtgtaacctccagttttagagctagaaatagcaagttaaaataaggctagtccgttatcaacttgaaaaagtggcaccgagtcggtgcggattgcagaatttgttcactgagccatggaggttacac

SEQ ID NO: 7517 - RNA, 137 nt, synthetic construct
  source 1..137: mol_type = other RNA; note = PEgRNA
ccctgccagtgtaacctccagttttagagctagaaatagcaagttaaaataaggctagtccgttatcaacttgaaaaagtggcaccgagtcggtgcgaggattgcagaatttgttcactgagccatggaggttacac

SEQ ID NO: 7518 - RNA, 139 nt, synthetic construct
  source 1..139: mol_type = other RNA; note = PEgRNA
ccctgccagtgtaacctccagttttagagctagaaatagcaagttaaaataaggctagtccgttatcaacttgaaaaagtggcaccgagtcggtgcgtgaggattgcagaatttgttcactgagccatggaggttacac

SEQ ID NO: 7519 - RNA, 127 nt, synthetic construct
  source 1..127: mol_type = other RNA; note = pegRNA
gtgtaacctccatggctcaggttttagagctagaaatagcaagttaaaataaggctagtccgttatcaacttgaaaaagtggcaccgagtcggtgcattgcagaatttgttcactgagccatggagg

SEQ ID NO: 7520 - RNA, 129 nt, synthetic construct
  source 1..129: mol_type = other RNA; note = pegRNA
gtgtaacctccatggctcaggttttagagctagaaatagcaagttaaaataaggctagtccgttatcaacttgaaaaagtggcaccgagtcggtgcggattgcagaatttgttcactgagccatggagg

SEQ ID NO: 7521 - RNA, 131 nt, synthetic construct
  source 1..131: mol_type = other RNA; note = pegRNA
gtgtaacctccatggctcaggttttagagctagaaatagcaagttaaaataaggctagtccgttatcaacttgaaaaagtggcaccgagtcggtgcgaggattgcagaatttgttcactgagccatggagg

SEQ ID NO: 7522 - RNA, 133 nt, synthetic construct
  source 1..133: mol_type = other RNA; note = pegRNA
gtgtaacctccatggctcaggttttagagctagaaatagcaagttaaaataaggctagtccgttatcaacttgaaaaagtggcaccgagtcggtgcgtgaggattgcagaatttgttcactgagccatggagg

SEQ ID NO: 7523 - RNA, 120 nt, synthetic construct
  source 1..120: mol_type = other RNA; note = PEgRNA
tgcactcacactgcccagaggttttagagctagaaatagcaagttaaaataaggctagtccgttatcaacttgaaaaagtggcaccgagtcggtgcttctgcaatcctcactctgggcag

SEQ ID NO: 7524 - RNA, 122 nt, synthetic construct
  source 1..122: mol_type = other RNA; note = PEgRNA
tgcactcacactgcccagaggttttagagctagaaatagcaagttaaaataaggctagtccgttatcaacttgaaaaagtggcaccgagtcggtgcaattctgcaatcctcactctgggcag

SEQ ID NO: 7525 - RNA, 125 nt, synthetic construct
  source 1..125: mol_type = other RNA; note = PEgRNA
tgcactcacactgcccagaggttttagagctagaaatagcaagttaaaataaggctagtccgttatcaacttgaaaaagtggcaccgagtcggtgcacaaattctgcaatcctcactctgggcag

SEQ ID NO: 7526 - RNA, 126 nt, synthetic construct
  source 1..126: mol_type = other RNA; note = PEgRNA
tgcactcacactgcccagaggttttagagctagaaatagcaagttaaaataaggctagtccgttatcaacttgaaaaagtggcaccgagtcggtgcaacaaattctgcaatcctcactctgggcag

SEQ ID NO: 7527 - RNA, 122 nt, synthetic construct
  source 1..122: mol_type = other RNA; note = PEgRNA
tgcactcacactgcccagaggttttagagctagaaatagcaagttaaaataaggctagtccgttatcaacttgaaaaagtggcaccgagtcggtgcttctgcaatcctcactctgggcagtg

SEQ ID NO: 7528 - RNA, 124 nt, synthetic construct
  source 1..124: mol_type = other RNA; note = PEgRNA
tgcactcacactgcccagaggttttagagctagaaatagcaagttaaaataaggctagtccgttatcaacttgaaaaagtggcaccgagtcggtgcaattctgcaatcctcactctgggcagtg

SEQ ID NO: 7529 - RNA, 127 nt, synthetic construct
  source 1..127: mol_type = other RNA; note = PEgRNA
tgcactcacactgcccagaggttttagagctagaaatagcaagttaaaataaggctagtccgttatcaacttgaaaaagtggcaccgagtcggtgcacaaattctgcaatcctcactctgggcagtg

SEQ ID NO: 7530 - RNA, 128 nt, synthetic construct
  source 1..128: mol_type = other RNA; note = PEgRNA
tgcactcacactgcccagaggttttagagctagaaatagcaagttaaaataaggctagtccgttatcaacttgaaaaagtggcaccgagtcggtgcaacaaattctgcaatcctcactctgggcagtg

SEQ ID NO: 7531 - RNA, 126 nt, synthetic construct
  source 1..126: mol_type = other RNA; note = PEgRNA
tgcactcacactgcccagaggttttagagctagaaatagcaagttaaaataaggctagtccgttatcaacttgaaaaagtggcaccgagtcggtgcttctgcaatcctcactctgggcagtgtgag

SEQ ID NO: 7532 - RNA, 128 nt, synthetic construct
  source 1..128: mol_type = other RNA; note = PEgRNA
tgcactcacactgcccagaggttttagagctagaaatagcaagttaaaataaggctagtccgttatcaacttgaaaaagtggcaccgagtcggtgcaattctgcaatcctcactctgggcagtgtgag

SEQ ID NO: 7533 - RNA, 131 nt, synthetic construct
  source 1..131: mol_type = other RNA; note = PEgRNA
tgcactcacactgcccagaggttttagagctagaaatagcaagttaaaataaggctagtccgttatcaacttgaaaaagtggcaccgagtcggtgcacaaattctgcaatcctcactctgggcagtgtgag

SEQ ID NO: 7534 - RNA, 132 nt, synthetic construct
  source 1..132: mol_type = other RNA; note = PEgRNA
tgcactcacactgcccagaggttttagagctagaaatagcaagttaaaataaggctagtccgttatcaacttgaaaaagtggcaccgagtcggtgcaacaaattctgcaatcctcactctgggcagtgtgag

SEQ ID NO: 7535 - RNA, 120 nt, synthetic construct
  source 1..120: mol_type = other RNA; note = PEgRNA
cactcacactgcccagagtggttttagagctagaaatagcaagttaaaataaggctagtccgttatcaacttgaaaaagtggcaccgagtcggtgcttctgcaatcctcactctgggcag

SEQ ID NO: 7536 - RNA, 122 nt, synthetic construct
  source 1..122: mol_type = other RNA; note = PEgRNA
cactcacactgcccagagtggttttagagctagaaatagcaagttaaaataaggctagtccgttatcaacttgaaaaagtggcaccgagtcggtgcaattctgcaatcctcactctgggcag

SEQ ID NO: 7537 - RNA, 125 nt, synthetic construct
  source 1..125: mol_type = other RNA; note = PEgRNA
cactcacactgcccagagtggttttagagctagaaatagcaagttaaaataaggctagtccgttatcaacttgaaaaagtggcaccgagtcggtgcacaaattctgcaatcctcactctgggcag

SEQ ID NO: 7538 - RNA, 126 nt, synthetic construct
  source 1..126: mol_type = other RNA; note = PEgRNA
cactcacactgcccagagtggttttagagctagaaatagcaagttaaaataaggctagtccgttatcaacttgaaaaagtggcaccgagtcggtgcaacaaattctgcaatcctcactctgggcag

SEQ ID NO: 7539 - RNA, 122 nt, synthetic construct
  source 1..122: mol_type = other RNA; note = PEgRNA
cactcacactgcccagagtggttttagagctagaaatagcaagttaaaataaggctagtccgttatcaacttgaaaaagtggcaccgagtcggtgcttctgcaatcctcactctgggcagtg

SEQ ID NO: 7540 - RNA, 124 nt, synthetic construct
  source 1..124: mol_type = other RNA; note = PEgRNA
cactcacactgcccagagtggttttagagctagaaatagcaagttaaaataaggctagtccgttatcaacttgaaaaagtggcaccgagtcggtgcaattctgcaatcctcactctgggcagtg

SEQ ID NO: 7541 - RNA, 127 nt, synthetic construct
  source 1..127: mol_type = other RNA; note = PEgRNA
cactcacactgcccagagtggttttagagctagaaatagcaagttaaaataaggctagtccgttatcaacttgaaaaagtggcaccgagtcggtgcacaaattctgcaatcctcactctgggcagtg

SEQ ID NO: 7542 - RNA, 128 nt, synthetic construct
  source 1..128: mol_type = other RNA; note = PEgRNA
cactcacactgcccagagtggttttagagctagaaatagcaagttaaaataaggctagtccgttatcaacttgaaaaagtggcaccgagtcggtgcaacaaattctgcaatcctcactctgggcagtg

SEQ ID NO: 7543 - DNA, 80 bp, synthetic construct
  source 1..80: mol_type = other DNA
gttttagagctagaaatagcaagttaaaataaggctagtccgttatcaacttgaaaaagtggcaccgagtcggtgctttt

SEQ ID NO: 7544 - RNA, 76 nt, synthetic construct
  source 1..76: mol_type = other RNA
gttttagagctagaaatagcaagttaaaataaggctagtccgttatcaacttgaaaaagtggcaccgagtcggtgc

SEQ ID NO: 7545 - RNA, 76 nt, synthetic construct
  source 1..76: mol_type = other RNA
gtttgagagctagaaatagcaagtttaaataaggctagtccgttatcaacttgaaaaagtgggaccgagtcggtcc

SEQ ID NO: 7546 - RNA, 86 nt, synthetic construct
  source 1..86: mol_type = other RNA
gtttaagagctatgctggaaacagcatagcaagtttaaataaggctagtccgttatcaacttgaaaaagtggcaccgagtcggtgc

SEQ ID NO: 7547 - protein, 19 aa, synthetic construct
  source 1..19: note = NLS
MKRTADGSEFESPKKKRKV

SEQ ID NO: 7548 - protein, 30 aa, synthetic construct
  source 1..30: note = NLS
MDSLLMNRRKFLYQFKNVRWAKGRRETYLC

SEQ ID NO: 7549 - protein, 20 aa, synthetic construct
  source 1..20: note = NLS of Nucleoplasmin
AVKRPAATKKAGQAKKKKLD

SEQ ID NO: 7550 - protein, 25 aa, synthetic construct
  source 1..25: note = NLS of EGL-13
MSRRRKANPTKLSENAKKLAKEVEN

SEQ ID NO: 7551 - protein, 16 aa, synthetic construct
  source 1..16: note = NLS of Rev protein
RQARRNRRRRWRERNR

SEQ ID NO: 7552 - protein, 10 aa, synthetic construct
  source 1..10: note = NLS of Hepatitis D virus antigen
EGAPPAKRAR

SEQ ID NO: 7553 - protein, 12 aa, synthetic construct
  source 1..12: note = NLS of murine p53
PPQPKKKPLDGE

SEQ ID NO: 7554 - protein, 21 aa, synthetic construct
  source 1..21: note = C terminal linker and NLS of an exemplary prime editor fusion protein
SGGSKRTADGSEFEPKKKRKV

SEQ ID NO: 7555 - protein, 17 aa, synthetic construct
  source 1..17: note = C Terminal NLS of an exemplary prime editor fusion protein
KRTADGSEFEPKKKRKV

SEQ ID NO: 7556 - protein, 17 aa, synthetic construct
SKRPAAIKKAGQAKKKK

SEQ ID NO: 7557 - protein, 11 aa, synthetic construct
RQRRNELKRSF

SEQ ID NO: 7558 - protein, 38 aa, synthetic construct
NQSSNFGPMKGGNFGGRSSGPYGGGGQYFAKPRNQGGY

SEQ ID NO: 7559 - protein, 16 aa, synthetic construct
  source 1..16: note = Xenopus nucleoplasmin NLS
KRXXXXXXXXXXKKKL

SEQ ID NO: 7560 - protein, 2117 aa, synthetic construct
  source 1..2117: note = Exemplary Prime Editor [NLS]- [Cas9(H840A)]-[linker]-[MMLV_RT(D200N)(T330P)(L603W)(T306K) (W313F)] - [NLS]
MKRTADGSEFESPKKKRKVDKKYSIGLDIGTNSVGWAVITDEYKVPSKKFKVLGNTDRHSIKKNLIGALLFDSGETAEATRLKRTARRRYTRRKNRICYLQEIFSNEMAKVDDSFFHRLEESFLVEEDKKHERHPIFGNIVDEVAYHEKYPTIYHLRKKLVDSTDKADLRLIYLALAHMIKFRGHFLIEGDLNPDNSDVDKLFIQLVQTYNQLFEENPINASGVDAKAILSARLSKSRRLENLIAQLPGEKKNGLFGNLIALSLGLTPNFKSNFDLAEDAKLQLSKDTYDDDLDNLLAQIGDQYADLFLAAKNLSDAILLSDILRVNTEITKAPLSASMIKRYDEHHQDLTLLKALVRQQLPEKYKEIFFDQSKNGYAGYIDGGASQEEFYKFIKPILEKMDGTEELLVKLNREDLLRKQRTFDNGSIPHQIHLGELHAILRRQEDFYPFLKDNREKIEKILTFRIPYYVGPLARGNSRFAWMTRKSEETITPWNFEEVVDKGASAQSFIERMTNFDKNLPNEKVLPKHSLLYEYFTVYNELTKVKYVTEGMRKPAFLSGEQKKAIVDLLFKTNRKVTVKQLKEDYFKKIECFDSVEISGVEDRFNASLGTYHDLLKIIKDKDFLDNEENEDILEDIVLTLTLFEDREMIEERLKTYAHLFDDKVMKQLKRRRYTGWGRLSRKLINGIRDKQSGKTILDFLKSDGFANRNFMQLIHDDSLTFKEDIQKAQVSGQGDSLHEHIANLAGSPAIKKGILQTVKVVDELVKVMGRHKPENIVIEMARENQTTQKGQKNSRERMKRIEEGIKELGSQILKEHPVENTQLQNEKLYLYYLQNGRDMYVDQELDINRLSDYDVDAIVPQSFLKDDSIDNKVLTRSDKNRGKSDNVPSEEVVKKMKNYWRQLLNAKLITQRKFDNLTKAERGGLSELDKAGFIKRQLVETRQITKHVAQILDSRMNTKYDENDKLIREVKVITLKSKLVSDFRKDFQFYKVREINNYHHAHDAYLNAVVGTALIKKYPKLESEFVYGDYKVYDVRKMIAKSEQEIGKATAKYFFYSNIMNFFKTEITLANGEIRKRPLIETNGETGEIVWDKGRDFATVRKVLSMPQVNIVKKTEVQTGGFSKESILPKRNSDKLIARKKDWDPKKYGGFDSPTVAYSVLVVAKVEKGKSKKLKSVKELLGITIMERSSFEKNPIDFLEAKGYKEVKKDLIIKLPKYSLFELENGRKRMLASAGELQKGNELALPSKYVNFLYLASHYEKLKGSPEDNEQKQLFVEQHKHYLDEIIEQISEFSKRVILADANLDKVLSAYNKHRDKPIREQAENIIHLFTLTNLGAPAAFKYFDTTIDRKRYTSTKEVLDATLIHQSITGLYETRIDLSQLGGDSGGSSGGSSGSETPGTSESATPESSGGSSGGSSTLNIEDEYRLHETSKEPDVSLGSTWLSDFPQAWAETGGMGLAVRQAPLIIPLKATSTPVSIKQYPMSQEARLGIKPHIQRLLDQGILVPCQSPWNTPLLPVKKPGTNDYRPVQDLREVNKRVEDIHPTVPNPYNLLSGLPPSHQWYTVLDLKDAFFCLRLHPTSQPLFAFEWRDPEMGISGQLTWTRLPQGFKNSPTLFNEALHRDLADFRIQHPDLILLQYVDDLLLAATSELDCQQGTRALLQTLGNLGYRASAKKAQICQKQVKYLGYLLKEGQRWLTEARKETVMGQPTPKTPRQLREFLGKAGFCRLFIPGFAEMAAPLYPLTKPGTLFNWGPDQQKAYQEIKQALLTAPALGLPDLTKPFELFVDEKQGYAKGVLTQKLGPWRRPVAYLSKKLDPVAAGWPPCLRMVAAIAVLTKDAGKLTMGQPLVILAPHAVEALVKQPPDRWLSNARMTHYQALLLDTDRVQFGPVVALNPATLLPLPEEGLQHNCLDILAEAHGTRPDLTDQPLPDADHTWYTDGSSLLQEGQRKAGAAVTTETEVIWAKALPAGTSAQRAELIALTQALKMAEGKKLNVYTDSRYAFATAHIHGEIYRRRGWLTSEGKEIKNKDEILALLKALFLPKRLSIIHCPGHQKGHSAEARGNRMADQAARKAAITETPDTSTLLIENSSPSGGSKRTADGSEFEPKKKRKV

SEQ ID NO: 7561 - protein, 2116 aa, synthetic construct
  source 1..2116: note = Exemplary Prime Editor [NLS]- [Cas9(H840A)]-[linker]-[MMLV_RT(D200N)(T330P)(L603W)(T306K) (W313F)] - [NLS] without N-terminal methionine
KRTADGSEFESPKKKRKVDKKYSIGLDIGTNSVGWAVITDEYKVPSKKFKVLGNTDRHSIKKNLIGALLFDSGETAEATRLKRTARRRYTRRKNRICYLQEIFSNEMAKVDDSFFHRLEESFLVEEDKKHERHPIFGNIVDEVAYHEKYPTIYHLRKKLVDSTDKADLRLIYLALAHMIKFRGHFLIEGDLNPDNSDVDKLFIQLVQTYNQLFEENPINASGVDAKAILSARLSKSRRLENLIAQLPGEKKNGLFGNLIALSLGLTPNFKSNFDLAEDAKLQLSKDTYDDDLDNLLAQIGDQYADLFLAAKNLSDAILLSDILRVNTEITKAPLSASMIKRYDEHHQDLTLLKALVRQQLPEKYKEIFFDQSKNGYAGYIDGGASQEEFYKFIKPILEKMDGTEELLVKLNREDLLRKQRTFDNGSIPHQIHLGELHAILRRQEDFYPFLKDNREKIEKILTFRIPYYVGPLARGNSRFAWMTRKSEETITPWNFEEVVDKGASAQSFIERMTNFDKNLPNEKVLPKHSLLYEYFTVYNELTKVKYVTEGMRKPAFLSGEQKKAIVDLLFKTNRKVTVKQLKEDYFKKIECFDSVEISGVEDRFNASLGTYHDLLKIIKDKDFLDNEENEDILEDIVLTLTLFEDREMIEERLKTYAHLFDDKVMKQLKRRRYTGWGRLSRKLINGIRDKQSGKTILDFLKSDGFANRNFMQLIHDDSLTFKEDIQKAQVSGQGDSLHEHIANLAGSPAIKKGILQTVKVVDELVKVMGRHKPENIVIEMARENQTTQKGQKNSRERMKRIEEGIKELGSQILKEHPVENTQLQNEKLYLYYLQNGRDMYVDQELDINRLSDYDVDAIVPQSFLKDDSIDNKVLTRSDKNRGKSDNVPSEEVVKKMKNYWRQLLNAKLITQRKFDNLTKAERGGLSELDKAGFIKRQLVETRQITKHVAQILDSRMNTKYDENDKLIREVKVITLKSKLVSDFRKDFQFYKVREINNYHHAHDAYLNAVVGTALIKKYPKLESEFVYGDYKVYDVRKMIAKSEQEIGKATAKYFFYSNIMNFFKTEITLANGEIRKRPLIETNGETGEIVWDKGRDFATVRKVLSMPQVNIVKKTEVQTGGFSKESILPKRNSDKLIARKKDWDPKKYGGFDSPTVAYSVLVVAKVEKGKSKKLKSVKELLGITIMERSSFEKNPIDFLEAKGYKEVKKDLIIKLPKYSLFELENGRKRMLASAGELQKGNELALPSKYVNFLYLASHYEKLKGSPEDNEQKQLFVEQHKHYLDEIIEQISEFSKRVILADANLDKVLSAYNKHRDKPIREQAENIIHLFTLTNLGAPAAFKYFDTTIDRKRYTSTKEVLDATLIHQSITGLYETRIDLSQLGGDSGGSSGGSSGSETPGTSESATPESSGGSSGGSSTLNIEDEYRLHETSKEPDVSLGSTWLSDFPQAWAETGGMGLAVRQAPLIIPLKATSTPVSIKQYPMSQEARLGIKPHIQRLLDQGILVPCQSPWNTPLLPVKKPGTNDYRPVQDLREVNKRVEDIHPTVPNPYNLLSGLPPSHQWYTVLDLKDAFFCLRLHPTSQPLFAFEWRDPEMGISGQLTWTRLPQGFKNSPTLFNEALHRDLADFRIQHPDLILLQYVDDLLLAATSELDCQQGTRALLQTLGNLGYRASAKKAQICQKQVKYLGYLLKEGQRWLTEARKETVMGQPTPKTPRQLREFLGKAGFCRLFIPGFAEMAAPLYPLTKPGTLFNWGPDQQKAYQEIKQALLTAPALGLPDLTKPFELFVDEKQGYAKGVLTQKLGPWRRPVAYLSKKLDPVAAGWPPCLRMVAAIAVLTKDAGKLTMGQPLVILAPHAVEALVKQPPDRWLSNARMTHYQALLLDTDRVQFGPVVALNPATLLPLPEEGLQHNCLDILAEAHGTRPDLTDQPLPDADHTWYTDGSSLLQEGQRKAGAAVTTETEVIWAKALPAGTSAQRAELIALTQALKMAEGKKLNVYTDSRYAFATAHIHGEIYRRRGWLTSEGKEIKNKDEILALLKALFLPKRLSIIHCPGHQKGHSAEARGNRMADQAARKAAITETPDTSTLLIENSSPSGGSKRTADGSEFEPKKKRKV

SEQ ID NO: 7562 - protein, 1367 aa, synthetic construct
  source 1..1367: note = CAS9 (H840A) (MET MINUS)
DKKYSIGLDIGTNSVGWAVITDEYKVPSKKFKVLGNTDRHSIKKNLIGALLFDSGETAEATRLKRTARRRYTRRKNRICYLQEIFSNEMAKVDDSFFHRLEESFLVEEDKKHERHPIFGNIVDEVAYHEKYPTIYHLRKKLVDSTDKADLRLIYLALAHMIKFRGHFLIEGDLNPDNSDVDKLFIQLVQTYNQLFEENPINASGVDAKAILSARLSKSRRLENLIAQLPGEKKNGLFGNLIALSLGLTPNFKSNFDLAEDAKLQLSKDTYDDDLDNLLAQIGDQYADLFLAAKNLSDAILLSDILRVNTEITKAPLSASMIKRYDEHHQDLTLLKALVRQQLPEKYKEIFFDQSKNGYAGYIDGGASQEEFYKFIKPILEKMDGTEELLVKLNREDLLRKQRTFDNGSIPHQIHLGELHAILRRQEDFYPFLKDNREKIEKILTFRIPYYVGPLARGNSRFAWMTRKSEETITPWNFEEVVDKGASAQSFIERMTNFDKNLPNEKVLPKHSLLYEYFTVYNELTKVKYVTEGMRKPAFLSGEQKKAIVDLLFKTNRKVTVKQLKEDYFKKIECFDSVEISGVEDRFNASLGTYHDLLKIIKDKDFLDNEENEDILEDIVLTLTLFEDREMIEERLKTYAHLFDDKVMKQLKRRRYTGWGRLSRKLINGIRDKQSGKTILDFLKSDGFANRNFMQLIHDDSLTFKEDIQKAQVSGQGDSLHEHIANLAGSPAIKKGILQTVKVVDELVKVMGRHKPENIVIEMARENQTTQKGQKNSRERMKRIEEGIKELGSQILKEHPVENTQLQNEKLYLYYLQNGRDMYVDQELDINRLSDYDVDAIVPQSFLKDDSIDNKVLTRSDKNRGKSDNVPSEEVVKKMKNYWRQLLNAKLITQRKFDNLTKAERGGLSELDKAGFIKRQLVETRQITKHVAQILDSRMNTKYDENDKLIREVKVITLKSKLVSDFRKDFQFYKVREINNYHHAHDAYLNAVVGTALIKKYPKLESEFVYGDYKVYDVRKMIAKSEQEIGKATAKYFFYSNIMNFFKTEITLANGEIRKRPLIETNGETGEIVWDKGRDFATVRKVLSMPQVNIVKKTEVQTGGFSKESILPKRNSDKLIARKKDWDPKKYGGFDSPTVAYSVLVVAKVEKGKSKKLKSVKELLGITIMERSSFEKNPIDFLEAKGYKEVKKDLIIKLPKYSLFELENGRKRMLASAGELQKGNELALPSKYVNFLYLASHYEKLKGSPEDNEQKQLFVEQHKHYLDEIIEQISEFSKRVILADANLDKVLSAYNKHRDKPIREQAENIIHLFTLTNLGAPAAFKYFDTTIDRKRYTSTKEVLDATLIHQSITGLYETRIDLSQLGGD

SEQ ID NO: 7563 - protein, 33 aa, synthetic construct
  source 1..33: note = LINKER BETWEEN CAS9 DOMAIN AND RT DOMAIN (33 AMINO ACIDS)
SGGSSGGSSGSETPGTSESATPESSGGSSGGSS

SEQ ID NO: 7564 - protein, 677 aa, synthetic construct
  source 1..677: note = MMLV_RT  D200N  T330P  L603W  T306K W313F
TLNIEDEYRLHETSKEPDVSLGSTWLSDFPQAWAETGGMGLAVRQAPLIIPLKATSTPVSIKQYPMSQEARLGIKPHIQRLLDQGILVPCQSPWNTPLLPVKKPGTNDYRPVQDLREVNKRVEDIHPTVPNPYNLLSGLPPSHQWYTVLDLKDAFFCLRLHPTSQPLFAFEWRDPEMGISGQLTWTRLPQGFKNSPTLFNEALHRDLADFRIQHPDLILLQYVDDLLLAATSELDCQQGTRALLQTLGNLGYRASAKKAQICQKQVKYLGYLLKEGQRWLTEARKETVMGQPTPKTPRQLREFLGKAGFCRLFIPGFAEMAAPLYPLTKPGTLFNWGPDQQKAYQEIKQALLTAPALGLPDLTKPFELFVDEKQGYAKGVLTQKLGPWRRPVAYLSKKLDPVAAGWPPCLRMVAAIAVLTKDAGKLTMGQPLVILAPHAVEALVKQPPDRWLSNARMTHYQALLLDTDRVQFGPVVALNPATLLPLPEEGLQHNCLDILAEAHGTRPDLTDQPLPDADHTWYTDGSSLLQEGQRKAGAAVTTETEVIWAKALPAGTSAQRAELIALTQALKMAEGKKLNVYTDSRYAFATAHIHGEIYRRRGWLTSEGKEIKNKDEILALLKALFLPKRLSIIHCPGHQKGHSAEARGNRMADQAARKAAITETPDTSTLLIENSSP

SEQ ID NO: 7565 - protein, 2131 aa, synthetic construct
  source 1..2131: note = Exemplary prime editor [NLS]- [Cas9((R220K) (R393K) (H839A)]-[linker]-[MMLV_RT(D200N)(T330P)(L603W)(T306K)(W313 F)] - [NLS]
MKRTADGSEFESPKKKRKVDKKYSIGLDIGTNSVGWAVITDEYKVPSKKFKVLGNTDRHSIKKNLIGALLFDSGETAEATRLKRTARRRYTRRKNRICYLQEIFSNEMAKVDDSFFHRLEESFLVEEDKKHERHPIFGNIVDEVAYHEKYPTIYHLRKKLVDSTDKADLRLIYLALAHMIKFRGHFLIEGDLNPDNSDVDKLFIQLVQTYNQLFEENPINASGVDAKAILSARLSKSRKLENLIAQLPGEKKNGLFGNLIALSLGLTPNFKSNFDLAEDAKLQLSKDTYDDDLDNLLAQIGDQYADLFLAAKNLSDAILLSDILRVNTEITKAPLSASMIKRYDEHHQDLTLLKALVRQQLPEKYKEIFFDQSKNGYAGYIDGGASQEEFYKFIKPILEKMDGTEELLVKLKREDLLRKQRTFDNGSIPHQIHLGELHAILRRQEDFYPFLKDNREKIEKILTFRIPYYVGPLARGNSRFAWMTRKSEETITPWNFEEVVDKGASAQSFIERMTNFDKNLPNEKVLPKHSLLYEYFTVYNELTKVKYVTEGMRKPAFLSGEQKKAIVDLLFKTNRKVTVKQLKEDYFKKIECFDSVEISGVEDRFNASLGTYHDLLKIIKDKDFLDNEENEDILEDIVLTLTLFEDREMIEERLKTYAHLFDDKVMKQLKRRRYTGWGRLSRKLINGIRDKQSGKTILDFLKSDGFANRNFMQLIHDDSLTFKEDIQKAQVSGQGDSLHEHIANLAGSPAIKKGILQTVKVVDELVKVMGRHKPENIVIEMARENQTTQKGQKNSRERMKRIEEGIKELGSQILKEHPVENTQLQNEKLYLYYLQNGRDMYVDQELDINRLSDYDVDAIVPQSFLKDDSIDNKVLTRSDKNRGKSDNVPSEEVVKKMKNYWRQLLNAKLITQRKFDNLTKAERGGLSELDKAGFIKRQLVETRQITKHVAQILDSRMNTKYDENDKLIREVKVITLKSKLVSDFRKDFQFYKVREINNYHHAHDAYLNAVVGTALIKKYPKLESEFVYGDYKVYDVRKMIAKSEQEIGKATAKYFFYSNIMNFFKTEITLANGEIRKRPLIETNGETGEIVWDKGRDFATVRKVLSMPQVNIVKKTEVQTGGFSKESILPKRNSDKLIARKKDWDPKKYGGFDSPTVAYSVLVVAKVEKGKSKKLKSVKELLGITIMERSSFEKNPIDFLEAKGYKEVKKDLIIKLPKYSLFELENGRKRMLASAGELQKGNELALPSKYVNFLYLASHYEKLKGSPEDNEQKQLFVEQHKHYLDEIIEQISEFSKRVILADANLDKVLSAYNKHRDKPIREQAENIIHLFTLTNLGAPAAFKYFDTTIDRKRYTSTKEVLDATLIHQSITGLYETRIDLSQLGGDSGGSSGGSKRTADGSEFESPKKKRKVSGGSSGGSTLNIEDEYRLHETSKEPDVSLGSTWLSDFPQAWAETGGMGLAVRQAPLIIPLKATSTPVSIKQYPMSQEARLGIKPHIQRLLDQGILVPCQSPWNTPLLPVKKPGTNDYRPVQDLREVNKRVEDIHPTVPNPYNLLSGLPPSHQWYTVLDLKDAFFCLRLHPTSQPLFAFEWRDPEMGISGQLTWTRLPQGFKNSPTLFNEALHRDLADFRIQHPDLILLQYVDDLLLAATSELDCQQGTRALLQTLGNLGYRASAKKAQICQKQVKYLGYLLKEGQRWLTEARKETVMGQPTPKTPRQLREFLGKAGFCRLFIPGFAEMAAPLYPLTKPGTLFNWGPDQQKAYQEIKQALLTAPALGLPDLTKPFELFVDEKQGYAKGVLTQKLGPWRRPVAYLSKKLDPVAAGWPPCLRMVAAIAVLTKDAGKLTMGQPLVILAPHAVEALVKQPPDRWLSNARMTHYQALLLDTDRVQFGPVVALNPATLLPLPEEGLQHNCLDILAEAHGTRPDLTDQPLPDADHTWYTDGSSLLQEGQRKAGAAVTTETEVIWAKALPAGTSAQRAELIALTQALKMAEGKKLNVYTDSRYAFATAHIHGEIYRRRGWLTSEGKEIKNKDEILALLKALFLPKRLSIIHCPGHQKGHSAEARGNRMADQAARKAAITETPDTSTLLIENSSPSGGSKRTADGSEFESPKKKRKVGSGPAAKRVKLD

SEQ ID NO: 7566 - protein, 2130 aa, synthetic construct
  source 1..2130: note = Exemplary prime editor [NLS]- [Cas9((R220K) (R393K) (H839A)]-[linker]-[MMLV_RT(D200N)(T330P)(L603W)(T306K)(W313 F)] - [NLS] without N terminal methionine
KRTADGSEFESPKKKRKVDKKYSIGLDIGTNSVGWAVITDEYKVPSKKFKVLGNTDRHSIKKNLIGALLFDSGETAEATRLKRTARRRYTRRKNRICYLQEIFSNEMAKVDDSFFHRLEESFLVEEDKKHERHPIFGNIVDEVAYHEKYPTIYHLRKKLVDSTDKADLRLIYLALAHMIKFRGHFLIEGDLNPDNSDVDKLFIQLVQTYNQLFEENPINASGVDAKAILSARLSKSRKLENLIAQLPGEKKNGLFGNLIALSLGLTPNFKSNFDLAEDAKLQLSKDTYDDDLDNLLAQIGDQYADLFLAAKNLSDAILLSDILRVNTEITKAPLSASMIKRYDEHHQDLTLLKALVRQQLPEKYKEIFFDQSKNGYAGYIDGGASQEEFYKFIKPILEKMDGTEELLVKLKREDLLRKQRTFDNGSIPHQIHLGELHAILRRQEDFYPFLKDNREKIEKILTFRIPYYVGPLARGNSRFAWMTRKSEETITPWNFEEVVDKGASAQSFIERMTNFDKNLPNEKVLPKHSLLYEYFTVYNELTKVKYVTEGMRKPAFLSGEQKKAIVDLLFKTNRKVTVKQLKEDYFKKIECFDSVEISGVEDRFNASLGTYHDLLKIIKDKDFLDNEENEDILEDIVLTLTLFEDREMIEERLKTYAHLFDDKVMKQLKRRRYTGWGRLSRKLINGIRDKQSGKTILDFLKSDGFANRNFMQLIHDDSLTFKEDIQKAQVSGQGDSLHEHIANLAGSPAIKKGILQTVKVVDELVKVMGRHKPENIVIEMARENQTTQKGQKNSRERMKRIEEGIKELGSQILKEHPVENTQLQNEKLYLYYLQNGRDMYVDQELDINRLSDYDVDAIVPQSFLKDDSIDNKVLTRSDKNRGKSDNVPSEEVVKKMKNYWRQLLNAKLITQRKFDNLTKAERGGLSELDKAGFIKRQLVETRQITKHVAQILDSRMNTKYDENDKLIREVKVITLKSKLVSDFRKDFQFYKVREINNYHHAHDAYLNAVVGTALIKKYPKLESEFVYGDYKVYDVRKMIAKSEQEIGKATAKYFFYSNIMNFFKTEITLANGEIRKRPLIETNGETGEIVWDKGRDFATVRKVLSMPQVNIVKKTEVQTGGFSKESILPKRNSDKLIARKKDWDPKKYGGFDSPTVAYSVLVVAKVEKGKSKKLKSVKELLGITIMERSSFEKNPIDFLEAKGYKEVKKDLIIKLPKYSLFELENGRKRMLASAGELQKGNELALPSKYVNFLYLASHYEKLKGSPEDNEQKQLFVEQHKHYLDEIIEQISEFSKRVILADANLDKVLSAYNKHRDKPIREQAENIIHLFTLTNLGAPAAFKYFDTTIDRKRYTSTKEVLDATLIHQSITGLYETRIDLSQLGGDSGGSSGGSKRTADGSEFESPKKKRKVSGGSSGGSTLNIEDEYRLHETSKEPDVSLGSTWLSDFPQAWAETGGMGLAVRQAPLIIPLKATSTPVSIKQYPMSQEARLGIKPHIQRLLDQGILVPCQSPWNTPLLPVKKPGTNDYRPVQDLREVNKRVEDIHPTVPNPYNLLSGLPPSHQWYTVLDLKDAFFCLRLHPTSQPLFAFEWRDPEMGISGQLTWTRLPQGFKNSPTLFNEALHRDLADFRIQHPDLILLQYVDDLLLAATSELDCQQGTRALLQTLGNLGYRASAKKAQICQKQVKYLGYLLKEGQRWLTEARKETVMGQPTPKTPRQLREFLGKAGFCRLFIPGFAEMAAPLYPLTKPGTLFNWGPDQQKAYQEIKQALLTAPALGLPDLTKPFELFVDEKQGYAKGVLTQKLGPWRRPVAYLSKKLDPVAAGWPPCLRMVAAIAVLTKDAGKLTMGQPLVILAPHAVEALVKQPPDRWLSNARMTHYQALLLDTDRVQFGPVVALNPATLLPLPEEGLQHNCLDILAEAHGTRPDLTDQPLPDADHTWYTDGSSLLQEGQRKAGAAVTTETEVIWAKALPAGTSAQRAELIALTQALKMAEGKKLNVYTDSRYAFATAHIHGEIYRRRGWLTSEGKEIKNKDEILALLKALFLPKRLSIIHCPGHQKGHSAEARGNRMADQAARKAAITETPDTSTLLIENSSPSGGSKRTADGSEFESPKKKRKVGSGPAAKRVKLD

SEQ ID NO: 7567 - protein, 1368 aa, unidentified [sequence omitted]

SEQ ID NO: 7568 - protein, 1367 aa, unidentified; identical to SEQ ID NO: 7562
  source 1..1367: note = Met (-) SpCas9 H839A nickase

SEQ ID NO: 7569 - protein, 1054 aa, unidentified
  source 1..1054: note = wild type Staphylococcus lugdunensis (Slu)Cas9
MNQKFILGLDIGITSVGYGLIDYETKNIIDAGVRLFPEANVENNEGRRSKRGSRRLKRRRIHRLERVKKLLEDYNLLDQSQIPQSTNPYAIRVKGLSEALSKDELVIALLHIAKRRGIHKIDVIDSNDDVGNELSTKEQLNKNSKLLKDKFVCQIQLERMNEGQVRGEKNRFKTADIIKEIIQLLNVQKNFHQLDENFINKYIELVEMRREYFEGPGKGSPYGWEGDPKAWYETLMGHCTYFPDELRSVKYAYSADLFNALNDLNNLVIQRDGLSKLEYHEKYHIIENVFKQKKKPTLKQIANEINVNPEDIKGYRITKSGKPQFTEFKLYHDLKSVLFDQSILENEDVLDQIAEILTIYQDKDSIKSKLTELDILLNEEDKENIAQLTGYTGTHRLSLKCIRLVLEEQWYSSRNQMEIFTHLNIKPKKINLTAANKIPKAMIDEFILSPVVKRTFGQAINLINKIIEKYGVPEDIIIELARENNSKDKQKFINEMQKKNENTRKRINEIIGKYGNQNAKRLVEKIRLHDEQEGKCLYSLESIPLEDLLNNPNHYEVDHIIPRSVSFDNSYHNKVLVKQSENSKKSNLTPYQYFNSGKSKLSYNQFKQHILNLSKSQDRISKKKKEYLLEERDINKFEVQKEFINRNLVDTRYATRELTNYLKAYFSANNMNVKVKTINGSFTDYLRKVWKFKKERNHGYKHHAEDALIIANADFLFKENKKLKAVNSVLEKPEIESKQLDIQVDSEDNYSEMFIIPKQVQDIKDFRNFKYSHRVDKKPNRQLINDTLYSTRKKDNSTYIVQTIKDIYAKDNTTLKKQFDKSPEKFLMYQHDPRTFEKLEVIMKQYANEKNPLAKYHEETGEYLTKYSKKNNGPIVKSLKYIGNKLGSHLDVTHQFKSSTKKLVKLSIKPYRFDVYLTDKGYKFITISYLDVLKKDNYYYIPEQKYDKLKLGKAIDKNAKFIASFYKNDLIKLDGEIYKIIGVNSDTRNMIELDLPDIRYKEYCELNNIKGEPRIKKTIGKKVNSIEKLTTDVLGNVFTNTQYTKPQLLFKRGN

SEQ ID NO: 7570 - protein, 1054 aa, unidentified
  source 1..1054: note = SluCas9 N582A nickase
MNQKFILGLDIGITSVGYGLIDYETKNIIDAGVRLFPEANVENNEGRRSKRGSRRLKRRRIHRLERVKKLLEDYNLLDQSQIPQSTNPYAIRVKGLSEALSKDELVIALLHIAKRRGIHKIDVIDSNDDVGNELSTKEQLNKNSKLLKDKFVCQIQLERMNEGQVRGEKNRFKTADIIKEIIQLLNVQKNFHQLDENFINKYIELVEMRREYFEGPGKGSPYGWEGDPKAWYETLMGHCTYFPDELRSVKYAYSADLFNALNDLNNLVIQRDGLSKLEYHEKYHIIENVFKQKKKPTLKQIANEINVNPEDIKGYRITKSGKPQFTEFKLYHDLKSVLFDQSILENEDVLDQIAEILTIYQDKDSIKSKLTELDILLNEEDKENIAQLTGYTGTHRLSLKCIRLVLEEQWYSSRNQMEIFTHLNIKPKKINLTAANKIPKAMIDEFILSPVVKRTFGQAINLINKIIEKYGVPEDIIIELARENNSKDKQKFINEMQKKNENTRKRINEIIGKYGNQNAKRLVEKIRLHDEQEGKCLYSLESIPLEDLLNNPNHYEVDHIIPRSVSFDNSYHNKVLVKQSEASKKSNLTPYQYFNSGKSKLSYNQFKQHILNLSKSQDRISKKKKEYLLEERDINKFEVQKEFINRNLVDTRYATRELTNYLKAYFSANNMNVKVKTINGSFTDYLRKVWKFKKERNHGYKHHAEDALIIANADFLFKENKKLKAVNSVLEKPEIESKQLDIQVDSEDNYSEMFIIPKQVQDIKDFRNFKYSHRVDKKPNRQLINDTLYSTRKKDNSTYIVQTIKDIYAKDNTTLKKQFDKSPEKFLMYQHDPRTFEKLEVIMKQYANEKNPLAKYHEETGEYLTKYSKKNNGPIVKSLKYIGNKLGSHLDVTHQFKSSTKKLVKLSIKPYRFDVYLTDKGYKFITISYLDVLKKDNYYYIPEQKYDKLKLGKAIDKNAKFIASFYKNDLIKLDGEIYKIIGVNSDTRNMIELDLPDIRYKEYCELNNIKGEPRIKKTIGKKVNSIEKLTTDVLGNVFTNTQYTKPQLLFKRGN

SEQ ID NO: 7571 - protein, 1053 aa, unidentified
  source 1..1053: note = Met (-) SluCas9 nickase
NQKFILGLDIGITSVGYGLIDYETKNIIDAGVRLFPEANVENNEGRRSKRGSRRLKRRRIHRLERVKKLLEDYNLLDQSQIPQSTNPYAIRVKGLSEALSKDELVIALLHIAKRRGIHKIDVIDSNDDVGNELSTKEQLNKNSKLLKDKFVCQIQLERMNEGQVRGEKNRFKTADIIKEIIQLLNVQKNFHQLDENFINKYIELVEMRREYFEGPGKGSPYGWEGDPKAWYETLMGHCTYFPDELRSVKYAYSADLFNALNDLNNLVIQRDGLSKLEYHEKYHIIENVFKQKKKPTLKQIANEINVNPEDIKGYRITKSGKPQFTEFKLYHDLKSVLFDQSILENEDVLDQIAEILTIYQDKDSIKSKLTELDILLNEEDKENIAQLTGYTGTHRLSLKCIRLVLEEQWYSSRNQMEIFTHLNIKPKKINLTAANKIPKAMIDEFILSPVVKRTFGQAINLINKIIEKYGVPEDIIIELARENNSKDKQKFINEMQKKNENTRKRINEIIGKYGNQNAKRLVEKIRLHDEQEGKCLYSLESIPLEDLLNNPNHYEVDHIIPRSVSFDNSYHNKVLVKQSEASKKSNLTPYQYFNSGKSKLSYNQFKQHILNLSKSQDRISKKKKEYLLEERDINKFEVQKEFINRNLVDTRYATRELTNYLKAYFSANNMNVKVKTINGSFTDYLRKVWKFKKERNHGYKHHAEDALIIANADFLFKENKKLKAVNSVLEKPEIESKQLDIQVDSEDNYSEMFIIPKQVQDIKDFRNFKYSHRVDKKPNRQLINDTLYSTRKKDNSTYIVQTIKDIYAKDNTTLKKQFDKSPEKFLMYQHDPRTFEKLEVIMKQYANEKNPLAKYHEETGEYLTKYSKKNNGPIVKSLKYIGNKLGSHLDVTHQFKSSTKKLVKLSIKPYRFDVYLTDKGYKFITISYLDVLKKDNYYYIPEQKYDKLKLGKAIDKNAKFIASFYKNDLIKLDGEIYKIIGVNSDTRNMIELDLPDIRYKEYCELNNIKGEPRIKKTIGKKVNSIEKLTTDVLGNVFTNTQYTKPQLLFKRGN

SEQ ID NO: 7572 - protein, 1053 aa, unidentified
  source 1..1053: note = Staphylococcus aureus Cas9 (SaCas9)
MKRNYILGLDIGITSVGYGIIDYETRDVIDAGVRLFKEANVENNEGRRSKRGARRLKRRRRHRIQRVKKLLFDYNLLTDHSELSGINPYEARVKGLSQKLSEEEFSAALLHLAKRRGVHNVNEVEEDTGNELSTKEQISRNSKALEEKYVAELQLERLKKDGEVRGSINRFKTSDYVKEAKQLLKVQKAYHQLDQSFIDTYIDLLETRRTYYEGPGEGSPFGWKDIKEWYEMLMGHCTYFPEELRSVKYAYNADLYNALNDLNNLVITRDENEKLEYYEKFQIIENVFKQKKKPTLKQIAKEILVNEEDIKGYRVTSTGKPEFTNLKVYHDIKDITARKEIIENAELLDQIAKILTIYQSSEDIQEELTNLNSELTQEEIEQISNLKGYTGTHNLSLKAINLILDELWHTNDNQIAIFNRLKLVPKKVDLSQQKEIPTTLVDDFILSPVVKRSFIQSIKVINAIIKKYGLPNDIIIELAREKNSKDAQKMINEMQKRNRQTNERIEEIIRTTGKENAKYLIEKIKLHDMQEGKCLYSLEAIPLEDLLNNPFNYEVDHIIPRSVSFDNSFNNKVLVKQEENSKKGNRTPFQYLSSSDSKISYETFKKHILNLAKGKGRISKTKKEYLLEERDINRFSVQKDFINRNLVDTRYATRGLMNLLRSYFRVNNLDVKVKSINGGFTSFLRRKWKFKKERNKGYKHHAEDALIIANADFIFKEWKKLDKAKKVMENQMFEEKQAESMPEIETEQEYKEIFITPHQIKHIKDFKDYKYSHRVDKKPNRELINDTLYSTRKDDKGNTLIVNNLNGLYDKDNDKLKKLINKSPEKLLMYHHDPQTYQKLKLIMEQYGDEKNPLYKYYEETGNYLTKYSKKDNGPVIKKIKYYGNKLNAHLDITDDYPNSRNKVVKLSLKPYRFDVYLDNGVYKFVTVKNLDVIKKENYYEVNSKCYEEAKKLKKISNQAEFIASFYNNDLIKINGELYRVIGVNNDLLNRIEVNMIDITYREYLENMNDKRPPRIIKTIASKTQSIKKYSTDILGNLYEVKSKKHPQIIKKG

SEQ ID NO: 7573 - protein, 1053 aa, unidentified
  source 1..1053: note = SaCas9 N580A nickase
MKRNYILGLDIGITSVGYGIIDYETRDVIDAGVRLFKEANVENNEGRRSKRGARRLKRRRRHRIQRVKKLLFDYNLLTDHSELSGINPYEARVKGLSQKLSEEEFSAALLHLAKRRGVHNVNEVEEDTGNELSTKEQISRNSKALEEKYVAELQLERLKKDGEVRGSINRFKTSDYVKEAKQLLKVQKAYHQLDQSFIDTYIDLLETRRTYYEGPGEGSPFGWKDIKEWYEMLMGHCTYFPEELRSVKYAYNADLYNALNDLNNLVITRDENEKLEYYEKFQIIENVFKQKKKPTLKQIAKEILVNEEDIKGYRVTSTGKPEFTNLKVYHDIKDITARKEIIENAELLDQIAKILTIYQSSEDIQEELTNLNSELTQEEIEQISNLKGYTGTHNLSLKAINLILDELWHTNDNQIAIFNRLKLVPKKVDLSQQKEIPTTLVDDFILSPVVKRSFIQSIKVINAIIKKYGLPNDIIIELAREKNSKDAQKMINEMQKRNRQTNERIEEIIRTTGKENAKYLIEKIKLHDMQEGKCLYSLEAIPLEDLLNNPFNYEVDHIIPRSVSFDNSFNNKVLVKQEEASKKGNRTPFQYLSSSDSKISYETFKKHILNLAKGKGRISKTKKEYLLEERDINRFSVQKDFINRNLVDTRYATRGLMNLLRSYFRVNNLDVKVKSINGGFTSFLRRKWKFKKERNKGYKHHAEDALIIANADFIFKEWKKLDKAKKVMENQMFEEKQAESMPEIETEQEYKEIFITPHQIKHIKDFKDYKYSHRVDKKPNRELINDTLYSTRKDDKGNTLIVNNLNGLYDKDNDKLKKLINKSPEKLLMYHHDPQTYQKLKLIMEQYGDEKNPLYKYYEETGNYLTKYSKKDNGPVIKKIKYYGNKLNAHLDITDDYPNSRNKVVKLSLKPYRFDVYLDNGVYKFVTVKNLDVIKKENYYEVNSKCYEEAKKLKKISNQAEFIASFYNNDLIKINGELYRVIGVNNDLLNRIEVNMIDITYREYLENMNDKRPPRIIKTIASKTQSIKKYSTDILGNLYEVKSKKHPQIIKKG

SEQ ID NO: 7574 - protein, 1052 aa, unidentified
  source 1..1052: note = Met (-) SaCas9 nickase
KRNYILGLDIGITSVGYGIIDYETRDVIDAGVRLFKEANVENNEGRRSKRGARRLKRRRRHRIQRVKKLLFDYNLLTDHSELSGINPYEARVKGLSQKLSEEEFSAALLHLAKRRGVHNVNEVEEDTGNELSTKEQISRNSKALEEKYVAELQLERLKKDGEVRGSINRFKTSDYVKEAKQLLKVQKAYHQLDQSFIDTYIDLLETRRTYYEGPGEGSPFGWKDIKEWYEMLMGHCTYFPEELRSVKYAYNADLYNALNDLNNLVITRDENEKLEYYEKFQIIENVFKQKKKPTLKQIAKEILVNEEDIKGYRVTSTGKPEFTNLKVYHDIKDITARKEIIENAELLDQIAKILTIYQSSEDIQEELTNLNSELTQEEIEQISNLKGYTGTHNLSLKAINLILDELWHTNDNQIAIFNRLKLVPKKVDLSQQKEIPTTLVDDFILSPVVKRSFIQSIKVINAIIKKYGLPNDIIIELAREKNSKDAQKMINEMQKRNRQTNERIEEIIRTTGKENAKYLIEKIKLHDMQEGKCLYSLEAIPLEDLLNNPFNYEVDHIIPRSVSFDNSFNNKVLVKQEEASKKGNRTPFQYLSSSDSKISYETFKKHILNLAKGKGRISKTKKEYLLEERDINRFSVQKDFINRNLVDTRYATRGLMNLLRSYFRVNNLDVKVKSINGGFTSFLRRKWKFKKERNKGYKHHAEDALIIANADFIFKEWKKLDKAKKVMENQMFEEKQAESMPEIETEQEYKEIFITPHQIKHIKDFKDYKYSHRVDKKPNRELINDTLYSTRKDDKGNTLIVNNLNGLYDKDNDKLKKLINKSPEKLLMYHHDPQTYQKLKLIMEQYGDEKNPLYKYYEETGNYLTKYSKKDNGPVIKKIKYYGNKLNAHLDITDDYPNSRNKVVKLSLKPYRFDVYLDNGVYKFVTVKNLDVIKKENYYEVNSKCYEEAKKLKKISNQAEFIASFYNNDLIKINGELYRVIGVNNDLLNRIEVNMIDITYREYLENMNDKRPPRIIKTIASKTQSIKKYSTDILGNLYEVKSKKHPQIIKKG

SEQ ID NO: 7575 - protein, 1368 aa, unidentified
  source 1..1368: note = SpCas9-NG (VRVRFRR)
MDKKYSIGLDIGTNSVGWAVITDEYKVPSKKFKVLGNTDRHSIKKNLIGALLFDSGETAEATRLKRTARRRYTRRKNRICYLQEIFSNEMAKVDDSFFHRLEESFLVEEDKKHERHPIFGNIVDEVAYHEKYPTIYHLRKKLVDSTDKADLRLIYLALAHMIKFRGHFLIEGDLNPDNSDVDKLFIQLVQTYNQLFEENPINASGVDAKAILSARLSKSRRLENLIAQLPGEKKNGLFGNLIALSLGLTPNFKSNFDLAEDAKLQLSKDTYDDDLDNLLAQIGDQYADLFLAAKNLSDAILLSDILRVNTEITKAPLSASMIKRYDEHHQDLTLLKALVRQQLPEKYKEIFFDQSKNGYAGYIDGGASQEEFYKFIKPILEKMDGTEELLVKLNREDLLRKQRTFDNGSIPHQIHLGELHAILRRQEDFYPFLKDNREKIEKILTFRIPYYVGPLARGNSRFAWMTRKSEETITPWNFEEVVDKGASAQSFIERMTNFDKNLPNEKVLPKHSLLYEYFTVYNELTKVKYVTEGMRKPAFLSGEQKKAIVDLLFKTNRKVTVKQLKEDYFKKIECFDSVEISGVEDRFNASLGTYHDLLKIIKDKDFLDNEENEDILEDIVLTLTLFEDREMIEERLKTYAHLFDDKVMKQLKRRRYTGWGRLSRKLINGIRDKQSGKTILDFLKSDGFANRNFMQLIHDDSLTFKEDIQKAQVSGQGDSLHEHIANLAGSPAIKKGILQTVKVVDELVKVMGRHKPENIVIEMARENQTTQKGQKNSRERMKRIEEGIKELGSQILKEHPVENTQLQNEKLYLYYLQNGRDMYVDQELDINRLSDYDVDHIVPQSFLKDDSIDNKVLTRSDKNRGKSDNVPSEEVVKKMKNYWRQLLNAKLITQRKFDNLTKAERGGLSELDKAGFIKRQLVETRQITKHVAQILDSRMNTKYDENDKLIREVKVITLKSKLVSDFRKDFQFYKVREINNYHHAHDAYLNAVVGTALIKKYPKLESEFVYGDYKVYDVRKMIAKSEQEIGKATAKYFFYSNIMNFFKTEITLANGEIRKRPLIETNGETGEIVWDKGRDFATVRKVLSMPQVNIVKKTEVQTGGFSKESIRPKRNSDKLIARKKDWDPKKYGGFVSPTVAYSVLVVAKVEKGKSKKLKSVKELLGITIMERSSFEKNPIDFLEAKGYKEVKKDLIIKLPKYSLFELENGRKRMLASARFLQKGNELALPSKYVNFLYLASHYEKLKGSPEDNEQKQLFVEQHKHYLDEIIEQISEFSKRVILADANLDKVLSAYNKHRDKPIREQAENIIHLFTLTNLGAPRAFKYFDTTIDRKVYRSTKEVLDATLIHQSITGLYETRIDLSQLGGD

SEQ ID NO: 7576 - protein, 1368 aa, unidentified
  source 1..1368: note = spCas9-NG (H840A_VRVRFRR) Nickase
MDKKYSIGLDIGTNSVGWAVITDEYKVPSKKFKVLGNTDRHSIKKNLIGALLFDSGETAEATRLKRTARRRYTRRKNRICYLQEIFSNEMAKVDDSFFHRLEESFLVEEDKKHERHPIFGNIVDEVAYHEKYPTIYHLRKKLVDSTDKADLRLIYLALAHMIKFRGHFLIEGDLNPDNSDVDKLFIQLVQTYNQLFEENPINASGVDAKAILSARLSKSRRLENLIAQLPGEKKNGLFGNLIALSLGLTPNFKSNFDLAEDAKLQLSKDTYDDDLDNLLAQIGDQYADLFLAAKNLSDAILLSDILRVNTEITKAPLSASMIKRYDEHHQDLTLLKALVRQQLPEKYKEIFFDQSKNGYAGYIDGGASQEEFYKFIKPILEKMDGTEELLVKLNREDLLRKQRTFDNGSIPHQIHLGELHAILRRQEDFYPFLKDNREKIEKILTFRIPYYVGPLARGNSRFAWMTRKSEETITPWNFEEVVDKGASAQSFIERMTNFDKNLPNEKVLPKHSLLYEYFTVYNELTKVKYVTEGMRKPAFLSGEQKKAIVDLLFKTNRKVTVKQLKEDYFKKIECFDSVEISGVEDRFNASLGTYHDLLKIIKDKDFLDNEENEDILEDIVLTLTLFEDREMIEERLKTYAHLFDDKVMKQLKRRRYTGWGRLSRKLINGIRDKQSGKTILDFLKSDGFANRNFMQLIHDDSLTFKEDIQKAQVSGQGDSLHEHIANLAGSPAIKKGILQTVKVVDELVKVMGRHKPENIVIEMARENQTTQKGQKNSRERMKRIEEGIKELGSQILKEHPVENTQLQNEKLYLYYLQNGRDMYVDQELDINRLSDYDVDAIVPQSFLKDDSIDNKVLTRSDKNRGKSDNVPSEEVVKKMKNYWRQLLNAKLITQRKFDNLTKAERGGLSELDKAGFIKRQLVETRQITKHVAQILDSRMNTKYDENDKLIREVKVITLKSKLVSDFRKDFQFYKVREINNYHHAHDAYLNAVVGTALIKKYPKLESEFVYGDYKVYDVRKMIAKSEQEIGKATAKYFFYSNIMNFFKTEITLANGEIRKRPLIETNGETGEIVWDKGRDFATVRKVLSMPQVNIVKKTEVQTGGFSKESIRPKRNSDKLIARKKDWDPKKYGGFVSPTVAYSVLVVAKVEKGKSKKLKSVKELLGITIMERSSFEKNPIDFLEAKGYKEVKKDLIIKLPKYSLFELENGRKRMLASARFLQKGNELALPSKYVNFLYLASHYEKLKGSPEDNEQKQLFVEQHKHYLDEIIEQISEFSKRVILADANLDKVLSAYNKHRDKPIREQAENIIHLFTLTNLGAPRAFKYFDTTIDRKVYRSTKEVLDATLIHQSITGLYETRIDLSQLGGD

SEQ ID NO: 7577 - protein, 1367 aa, unidentified
  source 1..1367: note = Met (-) SpCas9-NG Nickase
DKKYSIGLDIGTNSVGWAVITDEYKVPSKKFKVLGNTDRHSIKKNLIGALLFDSGETAEATRLKRTARRRYTRRKNRICYLQEIFSNEMAKVDDSFFHRLEESFLVEEDKKHERHPIFGNIVDEVAYHEKYPTIYHLRKKLVDSTDKADLRLIYLALAHMIKFRGHFLIEGDLNPDNSDVDKLFIQLVQTYNQLFEENPINASGVDAKAILSARLSKSRRLENLIAQLPGEKKNGLFGNLIALSLGLTPNFKSNFDLAEDAKLQLSKDTYDDDLDNLLAQIGDQYADLFLAAKNLSDAILLSDILRVNTEITKAPLSASMIKRYDEHHQDLTLLKALVRQQLPEKYKEIFFDQSKNGYAGYIDGGASQEEFYKFIKPILEKMDGTEELLVKLNREDLLRKQRTFDNGSIPHQIHLGELHAILRRQEDFYPFLKDNREKIEKILTFRIPYYVGPLARGNSRFAWMTRKSEETITPWNFEEVVDKGASAQSFIERMTNFDKNLPNEKVLPKHSLLYEYFTVYNELTKVKYVTEGMRKPAFLSGEQKKAIVDLLFKTNRKVTVKQLKEDYFKKIECFDSVEISGVEDRFNASLGTYHDLLKIIKDKDFLDNEENEDILEDIVLTLTLFEDREMIEERLKTYAHLFDDKVMKQLKRRRYTGWGRLSRKLINGIRDKQSGKTILDFLKSDGFANRNFMQLIHDDSLTFKEDIQKAQVSGQGDSLHEHIANLAGSPAIKKGILQTVKVVDELVKVMGRHKPENIVIEMARENQTTQKGQKNSRERMKRIEEGIKELGSQILKEHPVENTQLQNEKLYLYYLQNGRDMYVDQELDINRLSDYDVDAIVPQSFLKDDSIDNKVLTRSDKNRGKSDNVPSEEVVKKMKNYWRQLLNAKLITQRKFDNLTKAERGGLSELDKAGFIKRQLVETRQITKHVAQILDSRMNTKYDENDKLIREVKVITLKSKLVSDFRKDFQFYKVREINNYHHAHDAYLNAVVGTALIKKYPKLESEFVYGDYKVYDVRKMIAKSEQEIGKATAKYFFYSNIMNFFKTEITLANGEIRKRPLIETNGETGEIVWDKGRDFATVRKVLSMPQVNIVKKTEVQTGGFSKESIRPKRNSDKLIARKKDWDPKKYGGFVSPTVAYSVLVVAKVEKGKSKKLKSVKELLGITIMERSSFEKNPIDFLEAKGYKEVKKDLIIKLPKYSLFELENGRKRMLASARFLQKGNELALPSKYVNFLYLASHYEKLKGSPEDNEQKQLFVEQHKHYLDEIIEQISEFSKRVILADANLDKVLSAYNKHRDKPIREQAENIIHLFTLTNLGAPRAFKYFDTTIDRKVYRSTKEVLDATLIHQSITGLYETRIDLSQLGGD

SEQ ID NO: 7578 - protein, 1368 aa, unidentified
  source 1..1368: note = spCas9-NGA (VRQR)
MDKKYSIGLDIGTNSVGWAVITDEYKVPSKKFKVLGNTDRHSIKKNLIGALLFDSGETAEATRLKRTARRRYTRRKNRICYLQEIFSNEMAKVDDSFFHRLEESFLVEEDKKHERHPIFGNIVDEVAYHEKYPTIYHLRKKLVDSTDKADLRLIYLALAHMIKFRGHFLIEGDLNPDNSDVDKLFIQLVQTYNQLFEENPINASGVDAKAILSARLSKSRRLENLIAQLPGEKKNGLFGNLIALSLGLTPNFKSNFDLAEDAKLQLSKDTYDDDLDNLLAQIGDQYADLFLAAKNLSDAILLSDILRVNTEITKAPLSASMIKRYDEHHQDLTLLKALVRQQLPEKYKEIFFDQSKNGYAGYIDGGASQEEFYKFIKPILEKMDGTEELLVKLNREDLLRKQRTFDNGSIPHQIHLGELHAILRRQEDFYPFLKDNREKIEKILTFRIPYYVGPLARGNSRFAWMTRKSEETITPWNFEEVVDKGASAQSFIERMTNFDKNLPNEKVLPKHSLLYEYFTVYNELTKVKYVTEGMRKPAFLSGEQKKAIVDLLFKTNRKVTVKQLKEDYFKKIECFDSVEISGVEDRFNASLGTYHDLLKIIKDKDFLDNEENEDILEDIVLTLTLFEDREMIEERLKTYAHLFDDKVMKQLKRRRYTGWGRLSRKLINGIRDKQSGKTILDFLKSDGFANRNFMQLIHDDSLTFKEDIQKAQVSGQGDSLHEHIANLAGSPAIKKGILQTVKVVDELVKVMGRHKPENIVIEMARENQTTQKGQKNSRERMKRIEEGIKELGSQILKEHPVENTQLQNEKLYLYYLQNGRDMYVDQELDINRLSDYDVDHIVPQSFLKDDSIDNKVLTRSDKNRGKSDNVPSEEVVKKMKNYWRQLLNAKLITQRKFDNLTKAERGGLSELDKAGFIKRQLVETRQITKHVAQILDSRMNTKYDENDKLIREVKVITLKSKLVSDFRKDFQFYKVREINNYHHAHDAYLNAVVGTALIKKYPKLESEFVYGDYKVYDVRKMIAKSEQEIGKATAKYFFYSNIMNFFKTEITLANGEIRKRPLIETNGETGEIVWDKGRDFATVRKVLSMPQVNIVKKTEVQTGGFSKESILPKRNSDKLIARKKDWDPKKYGGFVSPTVAYSVLVVAKVEKGKSKKLKSVKELLGITIMERSSFEKNPIDFLEAKGYKEVKKDLIIKLPKYSLFELENGRKRMLASARELQKGNELALPSKYVNFLYLASHYEKLKGSPEDNEQKQLFVEQHKHYLDEIIEQISEFSKRVILADANLDKVLSAYNKHRDKPIREQAENIIHLFTLTNLGAPAAFKYFDTTIDRKQYRSTKEVLDATLIHQSITGLYETRIDLSQLGGD

SEQ ID NO: 7579 - protein, 1368 aa, unidentified
  source 1..1368: note = spCas9-NGA (H840A_VRQR) Nickase
MDKKYSIGLDIGTNSVGWAVITDEYKVPSKKFKVLGNTDRHSIKKNLIGALLFDSGETAEATRLKRTARRRYTRRKNRICYLQEIFSNEMAKVDDSFFHRLEESFLVEEDKKHERHPIFGNIVDEVAYHEKYPTIYHLRKKLVDSTDKADLRLIYLALAHMIKFRGHFLIEGDLNPDNSDVDKLFIQLVQTYNQLFEENPINASGVDAKAILSARLSKSRRLENLIAQLPGEKKNGLFGNLIALSLGLTPNFKSNFDLAEDAKLQLSKDTYDDDLDNLLAQIGDQYADLFLAAKNLSDAILLSDILRVNTEITKAPLSASMIKRYDEHHQDLTLLKALVRQQLPEKYKEIFFDQSKNGYAGYIDGGASQEEFYKFIKPILEKMDGTEELLVKLNREDLLRKQRTFDNGSIPHQIHLGELHAILRRQEDFYPFLKDNREKIEKILTFRIPYYVGPLARGNSRFAWMTRKSEETITPWNFEEVVDKGASAQSFIERMTNFDKNLPNEKVLPKHSLLYEYFTVYNELTKVKYVTEGMRKPAFLSGEQKKAIVDLLFKTNRKVTVKQLKEDYFKKIECFDSVEISGVEDRFNASLGTYHDLLKIIKDKDFLDNEENEDILEDIVLTLTLFEDREMIEERLKTYAHLFDDKVMKQLKRRRYTGWGRLSRKLINGIRDKQSGKTILDFLKSDGFANRNFMQLIHDDSLTFKEDIQKAQVSGQGDSLHEHIANLAGSPAIKKGILQTVKVVDELVKVMGRHKPENIVIEMARENQTTQKGQKNSRERMKRIEEGIKELGSQILKEHPVENTQLQNEKLYLYYLQNGRDMYVDQELDINRLSDYDVDAIVPQSFLKDDSIDNKVLTRSDKNRGKSDNVPSEEVVKKMKNYWRQLLNAKLITQRKFDNLTKAERGGLSELDKAGFIKRQLVETRQITKHVAQILDSRMNTKYDENDKLIREVKVITLKSKLVSDFRKDFQFYKVREINNYHHAHDAYLNAVVGTALIKKYPKLESEFVYGDYKVYDVRKMIAKSEQEIGKATAKYFFYSNIMNFFKTEITLANGEIRKRPLIETNGETGEIVWDKGRDFATVRKVLSMPQVNIVKKTEVQTGGFSKESILPKRNSDKLIARKKDWDPKKYGGFVSPTVAYSVLVVAKVEKGKSKKLKSVKELLGITIMERSSFEKNPIDFLEAKGYKEVKKDLIIKLPKYSLFELENGRKRMLASARELQKGNELALPSKYVNFLYLASHYEKLKGSPEDNEQKQLFVEQHKHYLDEIIEQISEFSKRVILADANLDKVLSAYNKHRDKPIREQAENIIHLFTLTNLGAPAAFKYFDTTIDRKQYRSTKEVLDATLIHQSITGLYETRIDLSQLGGD

SEQ ID NO: 7580 - protein, 1367 aa, unidentified
  source 1..1367: note = Met(-) spCas9-NGA Nickase
DKKYSIGLDIGTNSVGWAVITDEYKVPSKKFKVLGNTDRHSIKKNLIGALLFDSGETAEATRLKRTARRRYTRRKNRICYLQEIFSNEMAKVDDSFFHRLEESFLVEEDKKHERHPIFGNIVDEVAYHEKYPTIYHLRKKLVDSTDKADLRLIYLALAHMIKFRGHFLIEGDLNPDNSDVDKLFIQLVQTYNQLFEENPINASGVDAKAILSARLSKSRRLENLIAQLPGEKKNGLFGNLIALSLGLTPNFKSNFDLAEDAKLQLSKDTYDDDLDNLLAQIGDQYADLFLAAKNLSDAILLSDILRVNTEITKAPLSASMIKRYDEHHQDLTLLKALVRQQLPEKYKEIFFDQSKNGYAGYIDGGASQEEFYKFIKPILEKMDGTEELLVKLNREDLLRKQRTFDNGSIPHQIHLGELHAILRRQEDFYPFLKDNREKIEKILTFRIPYYVGPLARGNSRFAWMTRKSEETITPWNFEEVVDKGASAQSFIERMTNFDKNLPNEKVLPKHSLLYEYFTVYNELTKVKYVTEGMRKPAFLSGEQKKAIVDLLFKTNRKVTVKQLKEDYFKKIECFDSVEISGVEDRFNASLGTYHDLLKIIKDKDFLDNEENEDILEDIVLTLTLFEDREMIEERLKTYAHLFDDKVMKQLKRRRYTGWGRLSRKLINGIRDKQSGKTILDFLKSDGFANRNFMQLIHDDSLTFKEDIQKAQVSGQGDSLHEHIANLAGSPAIKKGILQTVKVVDELVKVMGRHKPENIVIEMARENQTTQKGQKNSRERMKRIEEGIKELGSQILKEHPVENTQLQNEKLYLYYLQNGRDMYVDQELDINRLSDYDVDAIVPQSFLKDDSIDNKVLTRSDKNRGKSDNVPSEEVVKKMKNYWRQLLNAKLITQRKFDNLTKAERGGLSELDKAGFIKRQLVETRQITKHVAQILDSRMNTKYDENDKLIREVKVITLKSKLVSDFRKDFQFYKVREINNYHHAHDAYLNAVVGTALIKKYPKLESEFVYGDYKVYDVRKMIAKSEQEIGKATAKYFFYSNIMNFFKTEITLANGEIRKRPLIETNGETGEIVWDKGRDFATVRKVLSMPQVNIVKKTEVQTGGFSKESILPKRNSDKLIARKKDWDPKKYGGFVSPTVAYSVLVVAKVEKGKSKKLKSVKELLGITIMERSSFEKNPIDFLEAKGYKEVKKDLIIKLPKYSLFELENGRKRMLASARELQKGNELALPSKYVNFLYLASHYEKLKGSPEDNEQKQLFVEQHKHYLDEIIEQISEFSKRVILADANLDKVLSAYNKHRDKPIREQAENIIHLFTLTNLGAPAAFKYFDTTIDRKQYRSTKEVLDATLIHQSITGLYETRIDLSQLGGD

SEQ ID NO: 7581 - protein, 1368 aa, unidentified
  source 1..1368: note = SpRY Cas9
MDKKYSIGLDIGTNSVGWAVITDEYKVPSKKFKVLGNTDRHSIKKNLIGALLFDSGETAERTRLKRTARRRYTRRKNRICYLQEIFSNEMAKVDDSFFHRLEESFLVEEDKKHERHPIFGNIVDEVAYHEKYPTIYHLRKKLVDSTDKADLRLIYLALAHMIKFRGHFLIEGDLNPDNSDVDKLFIQLVQTYNQLFEENPINASGVDAKAILSARLSKSRRLENLIAQLPGEKKNGLFGNLIALSLGLTPNFKSNFDLAEDAKLQLSKDTYDDDLDNLLAQIGDQYADLFLAAKNLSDAILLSDILRVNTEITKAPLSASMIKRYDEHHQDLTLLKALVRQQLPEKYKEIFFDQSKNGYAGYIDGGASQEEFYKFIKPILEKMDGTEELLVKLNREDLLRKQRTFDNGSIPHQIHLGELHAILRRQEDFYPFLKDNREKIEKILTFRIPYYVGPLARGNSRFAWMTRKSEETITPWNFEEVVDKGASAQSFIERMTNFDKNLPNEKVLPKHSLLYEYFTVYNELTKVKYVTEGMRKPAFLSGEQKKAIVDLLFKTNRKVTVKQLKEDYFKKIECFDSVEISGVEDRFNASLGTYHDLLKIIKDKDFLDNEENEDILEDIVLTLTLFEDREMIEERLKTYAHLFDDKVMKQLKRRRYTGWGRLSRKLINGIRDKQSGKTILDFLKSDGFANRNFMQLIHDDSLTFKEDIQKAQVSGQGDSLHEHIANLAGSPAIKKGILQTVKVVDELVKVMGRHKPENIVIEMARENQTTQKGQKNSRERMKRIEEGIKELGSQILKEHPVENTQLQNEKLYLYYLQNGRDMYVDQELDINRLSDYDVDHIVPQSFLKDDSIDNKVLTRSDKNRGKSDNVPSEEVVKKMKNYWRQLLNAKLITQRKFDNLTKAERGGLSELDKAGFIKRQLVETRQITKHVAQILDSRMNTKYDENDKLIREVKVITLKSKLVSDFRKDFQFYKVREINNYHHAHDAYLNAVVGTALIKKYPKLESEFVYGDYKVYDVRKMIAKSEQEIGKATAKYFFYSNIMNFFKTEITLANGEIRKRPLIETNGETGEIVWDKGRDFATVRKVLSMPQVNIVKKTEVQTGGFSKESIRPKRNSDKLIARKKDWDPKKYGGFLWPTVAYSVLVVAKVEKGKSKKLKSVKELLGITIMERSSFEKNPIDFLEAKGYKEVKKDLIIKLPKYSLFELENGRKRMLASAKQLQKGNELALPSKYVNFLYLASHYEKLKGSPEDNEQKQLFVEQHKHYLDEIIEQISEFSKRVILADANLDKVLSAYNKHRDKPIREQAENIIHLFTLTRLGAPRAFKYFDTTIDPKQYRSTKEVLDATLIHQSITGLYETRIDLSQLGGD

SEQ ID NO: 7582 - protein, 1368 aa, unidentified
  source 1..1368: note = SpRY Cas9 (H840A) Nickase
MDKKYSIGLDIGTNSVGWAVITDEYKVPSKKFKVLGNTDRHSIKKNLIGALLFDSGETAERTRLKRTARRRYTRRKNRICYLQEIFSNEMAKVDDSFFHRLEESFLVEEDKKHERHPIFGNIVDEVAYHEKYPTIYHLRKKLVDSTDKADLRLIYLALAHMIKFRGHFLIEGDLNPDNSDVDKLFIQLVQTYNQLFEENPINASGVDAKAILSARLSKSRRLENLIAQLPGEKKNGLFGNLIALSLGLTPNFKSNFDLAEDAKLQLSKDTYDDDLDNLLAQIGDQYADLFLAAKNLSDAILLSDILRVNTEITKAPLSASMIKRYDEHHQDLTLLKALVRQQLPEKYKEIFFDQSKNGYAGYIDGGASQEEFYKFIKPILEKMDGTEELLVKLNREDLLRKQRTFDNGSIPHQIHLGELHAILRRQEDFYPFLKDNREKIEKILTFRIPYYVGPLARGNSRFAWMTRKSEETITPWNFEEVVDKGASAQSFIERMTNFDKNLPNEKVLPKHSLLYEYFTVYNELTKVKYVTEGMRKPAFLSGEQKKAIVDLLFKTNRKVTVKQLKEDYFKKIECFDSVEISGVEDRFNASLGTYHDLLKIIKDKDFLDNEENEDILEDIVLTLTLFEDREMIEERLKTYAHLFDDKVMKQLKRRRYTGWGRLSRKLINGIRDKQSGKTILDFLKSDGFANRNFMQLIHDDSLTFKEDIQKAQVSGQGDSLHEHIANLAGSPAIKKGILQTVKVVDELVKVMGRHKPENIVIEMARENQTTQKGQKNSRERMKRIEEGIKELGSQILKEHPVENTQLQNEKLYLYYLQNGRDMYVDQELDINRLSDYDVDAIVPQSFLKDDSIDNKVLTRSDKNRGKSDNVPSEEVVKKMKNYWRQLLNAKLITQRKFDNLTKAERGGLSELDKAGFIKRQLVETRQITKHVAQILDSRMNTKYDENDKLIREVKVITLKSKLVSDFRKDFQFYKVREINNYHHAHDAYLNAVVGTALIKKYPKLESEFVYGDYKVYDVRKMIAKSEQEIGKATAKYFFYSNIMNFFKTEITLANGEIRKRPLIETNGETGEIVWDKGRDFATVRKVLSMPQVNIVKKTEVQTGGFSKESIRPKRNSDKLIARKKDWDPKKYGGFLWPTVAYSVLVVAKVEKGKSKKLKSVKELLGITIMERSSFEKNPIDFLEAKGYKEVKKDLIIKLPKYSLFELENGRKRMLASAKQLQKGNELALPSKYVNFLYLASHYEKLKGSPEDNEQKQLFVEQHKHYLDEIIEQISEFSKRVILADANLDKVLSAYNKHRDKPIREQAENIIHLFTLTRLGAPRAFKYFDTTIDPKQYRSTKEVLDATLIHQSITGLYETRIDLSQLGGD

SEQ ID NO: 7583 - protein, 1367 aa, unidentified
  source 1..1367: note = Met(-) SpRY Cas9 Nickase
DKKYSIGLDIGTNSVGWAVITDEYKVPSKKFKVLGNTDRHSIKKNLIGALLFDSGETAERTRLKRTARRRYTRRKNRICYLQEIFSNEMAKVDDSFFHRLEESFLVEEDKKHERHPIFGNIVDEVAYHEKYPTIYHLRKKLVDSTDKADLRLIYLALAHMIKFRGHFLIEGDLNPDNSDVDKLFIQLVQTYNQLFEENPINASGVDAKAILSARLSKSRRLENLIAQLPGEKKNGLFGNLIALSLGLTPNFKSNFDLAEDAKLQLSKDTYDDDLDNLLAQIGDQYADLFLAAKNLSDAILLSDILRVNTEITKAPLSASMIKRYDEHHQDLTLLKALVRQQLPEKYKEIFFDQSKNGYAGYIDGGASQEEFYKFIKPILEKMDGTEELLVKLNREDLLRKQRTFDNGSIPHQIHLGELHAILRRQEDFYPFLKDNREKIEKILTFRIPYYVGPLARGNSRFAWMTRKSEETITPWNFEEVVDKGASAQSFIERMTNFDKNLPNEKVLPKHSLLYEYFTVYNELTKVKYVTEGMRKPAFLSGEQKKAIVDLLFKTNRKVTVKQLKEDYFKKIECFDSVEISGVEDRFNASLGTYHDLLKIIKDKDFLDNEENEDILEDIVLTLTLFEDREMIEERLKTYAHLFDDKVMKQLKRRRYTGWGRLSRKLINGIRDKQSGKTILDFLKSDGFANRNFMQLIHDDSLTFKEDIQKAQVSGQGDSLHEHIANLAGSPAIKKGILQTVKVVDELVKVMGRHKPENIVIEMARENQTTQKGQKNSRERMKRIEEGIKELGSQILKEHPVENTQLQNEKLYLYYLQNGRDMYVDQELDINRLSDYDVDAIVPQSFLKDDSIDNKVLTRSDKNRGKSDNVPSEEVVKKMKNYWRQLLNAKLITQRKFDNLTKAERGGLSELDKAGFIKRQLVETRQITKHVAQILDSRMNTKYDENDKLIREVKVITLKSKLVSDFRKDFQFYKVREINNYHHAHDAYLNAVVGTALIKKYPKLESEFVYGDYKVYDVRKMIAKSEQEIGKATAKYFFYSNIMNFFKTEITLANGEIRKRPLIETNGETGEIVWDKGRDFATVRKVLSMPQVNIVKKTEVQTGGFSKESIRPKRNSDKLIARKKDWDPKKYGGFLWPTVAYSVLVVAKVEKGKSKKLKSVKELLGITIMERSSFEKNPIDFLEAKGYKEVKKDLIIKLPKYSLFELENGRKRMLASAKQLQKGNELALPSKYVNFLYLASHYEKLKGSPEDNEQKQLFVEQHKHYLDEIIEQISEFSKRVILADANLDKVLSAYNKHRDKPIREQAENIIHLFTLTRLGAPRAFKYFDTTIDPKQYRSTKEVLDATLIHQSITGLYETRIDLSQLGGD

SEQ ID NO: 7584 - protein, 1057 aa, unidentified
  source 1..1057: note = sRGN3.1
MNQKFILGLDIGITSVGYGLIDYETKNIIDAGVRLFPEANVENNEGRRSKRGSRRLKRRRIHRLERVKLLLTEYDLINKEQIPTSNNPYQIRVKGLSEILSKDELAIALLHLAKRRGIHNVDVAADKEETASDSLSTKDQINKNAKFLESRYVCELQKERLENEGHVRGVENRFLTKDIVREAKKIIDTQMQYYPEIDETFKEKYISLVETRREYFEGPGQGSPFGWNGDLKKWYEMLMGHCTYFPQELRSVKYAYSADLFNALNDLNNLIIQRDNSEKLEYHEKYHIIENVFKQKKKPTLKQIAKEIGVNPEDIKGYRITKSGTPEFTSFKLFHDLKKVVKDHAILDDIDLLNQIAEILTIYQDKDSIVAELGQLEYLMSEADKQSISELTGYTGTHSLSLKCMNMIIDELWHSSMNQMEVFTYLNMRPKKYELKGYQRIPTDMIDDAILSPVVKRTFIQSINVINKVIEKYGIPEDIIIELARENNSDDRKKFINNLQKKNEATRKRINEIIGQTGNQNAKRIVEKIRLHDQQEGKCLYSLESIPLEDLLNNPNHYEVDHIIPRSVSFDNSYHNKVLVKQSENSKKSNLTPYQYFNSGKSKLSYNQFKQHILNLSKSQDRISKKKKEYLLEERDINKFEVQKEFINRNLVDTRYATRELTNYLKAYFSANNMNVKVKTINGSFTDYLRKVWKFKKERNHGYKHHAEDALIIANADFLFKENKKLKAVNSVLEKPEIETKQLDIQVDSEDNYSEMFIIPKQVQDIKDFRNFKYSHRVDKKPNRQLINDTLYSTRKKDNSTYIVQTIKDIYAKDNTTLKKQFDKSPEKFLMYQHDPRTFEKLEVIMKQYANEKNPLAKYHEETGEYLTKYSKKNNGPIVKSLKYIGNKLGSHLDVTHQFKSSTKKLVKLSIKNYRFDVYLTEKGYKFVTIAYLNVFKKDNYYYIPKDKYQELKEKKKIKDTDQFIASFYKNDLIKLNGDLYKIIGVNSDDRNIIELDYYDIKYKDYCEINNIKGEPRIKKTIGKKTESIEKFTTDVLGNLYLHSTEKAPQLIFKRGL

SEQ ID NO: 7585 - protein, 1057 aa, unidentified
  source 1..1057: note = sRGN3.1(N585A) Nickase
MNQKFILGLDIGITSVGYGLIDYETKNIIDAGVRLFPEANVENNEGRRSKRGSRRLKRRRIHRLERVKLLLTEYDLINKEQIPTSNNPYQIRVKGLSEILSKDELAIALLHLAKRRGIHNVDVAADKEETASDSLSTKDQINKNAKFLESRYVCELQKERLENEGHVRGVENRFLTKDIVREAKKIIDTQMQYYPEIDETFKEKYISLVETRREYFEGPGQGSPFGWNGDLKKWYEMLMGHCTYFPQELRSVKYAYSADLFNALNDLNNLIIQRDNSEKLEYHEKYHIIENVFKQKKKPTLKQIAKEIGVNPEDIKGYRITKSGTPEFTSFKLFHDLKKVVKDHAILDDIDLLNQIAEILTIYQDKDSIVAELGQLEYLMSEADKQSISELTGYTGTHSLSLKCMNMIIDELWHSSMNQMEVFTYLNMRPKKYELKGYQRIPTDMIDDAILSPVVKRTFIQSINVINKVIEKYGIPEDIIIELARENNSDDRKKFINNLQKKNEATRKRINEIIGQTGNQNAKRIVEKIRLHDQQEGKCLYSLESIPLEDLLNNPNHYEVDHIIPRSVSFDNSYHNKVLVKQSEASKKSNLTPYQYFNSGKSKLSYNQFKQHILNLSKSQDRISKKKKEYLLEERDINKFEVQKEFINRNLVDTRYATRELTNYLKAYFSANNMNVKVKTINGSFTDYLRKVWKFKKERNHGYKHHAEDALIIANADFLFKENKKLKAVNSVLEKPEIETKQLDIQVDSEDNYSEMFIIPKQVQDIKDFRNFKYSHRVDKKPNRQLINDTLYSTRKKDNSTYIVQTIKDIYAKDNTTLKKQFDKSPEKFLMYQHDPRTFEKLEVIMKQYANEKNPLAKYHEETGEYLTKYSKKNNGPIVKSLKYIGNKLGSHLDVTHQFKSSTKKLVKLSIKNYRFDVYLTEKGYKFVTIAYLNVFKKDNYYYIPKDKYQELKEKKKIKDTDQFIASFYKNDLIKLNGDLYKIIGVNSDDRNIIELDYYDIKYKDYCEINNIKGEPRIKKTIGKKTESIEKFTTDVLGNLYLHSTEKAPQLIFKRGL

SEQ ID NO: 7586 - protein, 1056 aa, unidentified
  source 1..1056: note = Met(-) sRGN3.1(N584A) Nickase
NQKFILGLDIGITSVGYGLIDYETKNIIDAGVRLFPEANVENNEGRRSKRGSRRLKRRRIHRLERVKLLLTEYDLINKEQIPTSNNPYQIRVKGLSEILSKDELAIALLHLAKRRGIHNVDVAADKEETASDSLSTKDQINKNAKFLESRYVCELQKERLENEGHVRGVENRFLTKDIVREAKKIIDTQMQYYPEIDETFKEKYISLVETRREYFEGPGQGSPFGWNGDLKKWYEMLMGHCTYFPQELRSVKYAYSADLFNALNDLNNLIIQRDNSEKLEYHEKYHIIENVFKQKKKPTLKQIAKEIGVNPEDIKGYRITKSGTPEFTSFKLFHDLKKVVKDHAILDDIDLLNQIAEILTIYQDKDSIVAELGQLEYLMSEADKQSISELTGYTGTHSLSLKCMNMIIDELWHSSMNQMEVFTYLNMRPKKYELKGYQRIPTDMIDDAILSPVVKRTFIQSINVINKVIEKYGIPEDIIIELARENNSDDRKKFINNLQKKNEATRKRINEIIGQTGNQNAKRIVEKIRLHDQQEGKCLYSLESIPLEDLLNNPNHYEVDHIIPRSVSFDNSYHNKVLVKQSEASKKSNLTPYQYFNSGKSKLSYNQFKQHILNLSKSQDRISKKKKEYLLEERDINKFEVQKEFINRNLVDTRYATRELTNYLKAYFSANNMNVKVKTINGSFTDYLRKVWKFKKERNHGYKHHAEDALIIANADFLFKENKKLKAVNSVLEKPEIETKQLDIQVDSEDNYSEMFIIPKQVQDIKDFRNFKYSHRVDKKPNRQLINDTLYSTRKKDNSTYIVQTIKDIYAKDNTTLKKQFDKSPEKFLMYQHDPRTFEKLEVIMKQYANEKNPLAKYHEETGEYLTKYSKKNNGPIVKSLKYIGNKLGSHLDVTHQFKSSTKKLVKLSIKNYRFDVYLTEKGYKFVTIAYLNVFKKDNYYYIPKDKYQELKEKKKIKDTDQFIASFYKNDLIKLNGDLYKIIGVNSDDRNIIELDYYDIKYKDYCEINNIKGEPRIKKTIGKKTESIEKFTTDVLGNLYLHSTEKAPQLIFKRGL

SEQ ID NO: 7587 - protein, 1057 aa, unidentified
  source 1..1057: note = sRGN3.3
MNQKFILGLDIGITSVGYGLIDYETKNIIDAGVRLFPEANVENNEGRRSKRGSRRLKRRRIHRLERVKLLLTEYDLINKEQIPTSNNPYQIRVKGLSEILSKDELAIALLHLAKRRGIHNVDVAADKEETASDSLSTKDQINKNAKFLESRYVCELQKERLENEGHVRGVENRFLTKDIVREAKKIIDTQMQYYPEIDETFKEKYISLVETRREYFEGPGQGSPFGWNGDLKKWYEMLMGHCTYFPQELRSVKYAYSADLFNALNDLNNLIIQRDNSEKLEYHEKYHIIENVFKQKKKPTLKQIAKEIGVNPEDIKGYRITKSGTPEFTSFKLFHDLKKVVKDHAILDDIDLLNQIAEILTIYQDKDSIVAELGQLEYLMSEADKQSISELTGYTGTHSLSLKCMNMIIDELWHSSMNQMEVFTYLNMRPKKYELKGYQRIPTDMIDDAILSPVVKRTFIQSINVINKVIEKYGIPEDIIIELARENNSDDRKKFINNLQKKNEATRKRINEIIGQTGNQNAKRIVEKIRLHDQQEGKCLYSLESIPLEDLLNNPNHYEVDHIIPRSVSFDNSYHNKVLVKQSENSKKSNLTPYQYFNSGKSKLSYNQFKQHILNLSKSQDRISKKKKEYLLEERDINKFEVQKEFINRNLVDTRYATRELTSYLKAYFSANNMDVKVKTINGSFTNHLRKVWRFDKYRNHGYKHHAEDALIIANADFLFKENKKLQNTNKILEKPTIENNTKKVTVEKEEDYNNVFETPKLVEDIKQYRDYKFSHRVDKKPNRQLINDTLYSTRMKDEHDYIVQTITDIYGKDNTNLKKQFNKNPEKFLMYQNDPKTFEKLSIIMKQYSDEKNPLAKYYEETGEYLTKYSKKNNGPIVKKIKLLGNKVGNHLDVTNKYENSTKKLVKLSIKNYRFDVYLTEKGYKFVTIAYLNVFKKDNYYYIPKDKYQELKEKKKIKDTDQFIASFYKNDLIKLNGDLYKIIGVNSDDRNIIELDYYDIKYKDYCEINNIKGEPRIKKTIGKKTESIEKFTTDVLGNLYLHSTEKAPQLIFKRGL

SEQ ID NO: 7588 - protein, 1057 aa, unidentified
  source 1..1057: note = sRGN3.3(N585A) Nickase
MNQKFILGLDIGITSVGYGLIDYETKNIIDAGVRLFPEANVENNEGRRSKRGSRRLKRRRIHRLERVKLLLTEYDLINKEQIPTSNNPYQIRVKGLSEILSKDELAIALLHLAKRRGIHNVDVAADKEETASDSLSTKDQINKNAKFLESRYVCELQKERLENEGHVRGVENRFLTKDIVREAKKIIDTQMQYYPEIDETFKEKYISLVETRREYFEGPGQGSPFGWNGDLKKWYEMLMGHCTYFPQELRSVKYAYSADLFNALNDLNNLIIQRDNSEKLEYHEKYHIIENVFKQKKKPTLKQIAKEIGVNPEDIKGYRITKSGTPEFTSFKLFHDLKKVVKDHAILDDIDLLNQIAEILTIYQDKDSIVAELGQLEYLMSEADKQSISELTGYTGTHSLSLKCMNMIIDELWHSSMNQMEVFTYLNMRPKKYELKGYQRIPTDMIDDAILSPVVKRTFIQSINVINKVIEKYGIPEDIIIELARENNSDDRKKFINNLQKKNEATRKRINEIIGQTGNQNAKRIVEKIRLHDQQEGKCLYSLESIPLEDLLNNPNHYEVDHIIPRSVSFDNSYHNKVLVKQSEASKKSNLTPYQYFNSGKSKLSYNQFKQHILNLSKSQDRISKKKKEYLLEERDINKFEVQKEFINRNLVDTRYATRELTSYLKAYFSANNMDVKVKTINGSFTNHLRKVWRFDKYRNHGYKHHAEDALIIANADFLFKENKKLQNTNKILEKPTIENNTKKVTVEKEEDYNNVFETPKLVEDIKQYRDYKFSHRVDKKPNRQLINDTLYSTRMKDEHDYIVQTITDIYGKDNTNLKKQFNKNPEKFLMYQNDPKTFEKLSIIMKQYSDEKNPLAKYYEETGEYLTKYSKKNNGPIVKKIKLLGNKVGNHLDVTNKYENSTKKLVKLSIKNYRFDVYLTEKGYKFVTIAYLNVFKKDNYYYIPKDKYQELKEKKKIKDTDQFIASFYKNDLIKLNGDLYKIIGVNSDDRNIIELDYYDIKYKDYCEINNIKGEPRIKKTIGKKTESIEKFTTDVLGNLYLHSTEKAPQLIFKRGL

SEQ ID NO: 7589 - protein, 1056 aa, unidentified
  source 1..1056: note = Met(-) sRGN3.3(N584A)Nickase
NQKFILGLDIGITSVGYGLIDYETKNIIDAGVRLFPEANVENNEGRRSKRGSRRLKRRRIHRLERVKLLLTEYDLINKEQIPTSNNPYQIRVKGLSEILSKDELAIALLHLAKRRGIHNVDVAADKEETASDSLSTKDQINKNAKFLESRYVCELQKERLENEGHVRGVENRFLTKDIVREAKKIIDTQMQYYPEIDETFKEKYISLVETRREYFEGPGQGSPFGWNGDLKKWYEMLMGHCTYFPQELRSVKYAYSADLFNALNDLNNLIIQRDNSEKLEYHEKYHIIENVFKQKKKPTLKQIAKEIGVNPEDIKGYRITKSGTPEFTSFKLFHDLKKVVKDHAILDDIDLLNQIAEILTIYQDKDSIVAELGQLEYLMSEADKQSISELTGYTGTHSLSLKCMNMIIDELWHSSMNQMEVFTYLNMRPKKYELKGYQRIPTDMIDDAILSPVVKRTFIQSINVINKVIEKYGIPEDIIIELARENNSDDRKKFINNLQKKNEATRKRINEIIGQTGNQNAKRIVEKIRLHDQQEGKCLYSLESIPLEDLLNNPNHYEVDHIIPRSVSFDNSYHNKVLVKQSEASKKSNLTPYQYFNSGKSKLSYNQFKQHILNLSKSQDRISKKKKEYLLEERDINKFEVQKEFINRNLVDTRYATRELTSYLKAYFSANNMDVKVKTINGSFTNHLRKVWRFDKYRNHGYKHHAEDALIIANADFLFKENKKLQNTNKILEKPTIENNTKKVTVEKEEDYNNVFETPKLVEDIKQYRDYKFSHRVDKKPNRQLINDTLYSTRMKDEHDYIVQTITDIYGKDNTNLKKQFNKNPEKFLMYQNDPKTFEKLSIIMKQYSDEKNPLAKYYEETGEYLTKYSKKNNGPIVKKIKLLGNKVGNHLDVTNKYENSTKKLVKLSIKNYRFDVYLTEKGYKFVTIAYLNVFKKDNYYYIPKDKYQELKEKKKIKDTDQFIASFYKNDLIKLNGDLYKIIGVNSDDRNIIELDYYDIKYKDYCEINNIKGEPRIKKTIGKKTESIEKFTTDVLGNLYLHSTEKAPQLIFKRGL

SEQ ID NO: 7590 - protein, 1368 aa, unidentified
  source 1..1368: note = SpG
MDKKYSIGLDIGTNSVGWAVITDEYKVPSKKFKVLGNTDRHSIKKNLIGALLFDSGETAEATRLKRTARRRYTRRKNRICYLQEIFSNEMAKVDDSFFHRLEESFLVEEDKKHERHPIFGNIVDEVAYHEKYPTIYHLRKKLVDSTDKADLRLIYLALAHMIKFRGHFLIEGDLNPDNSDVDKLFIQLVQTYNQLFEENPINASGVDAKAILSARLSKSRRLENLIAQLPGEKKNGLFGNLIALSLGLTPNFKSNFDLAEDAKLQLSKDTYDDDLDNLLAQIGDQYADLFLAAKNLSDAILLSDILRVNTEITKAPLSASMIKRYDEHHQDLTLLKALVRQQLPEKYKEIFFDQSKNGYAGYIDGGASQEEFYKFIKPILEKMDGTEELLVKLNREDLLRKQRTFDNGSIPHQIHLGELHAILRRQEDFYPFLKDNREKIEKILTFRIPYYVGPLARGNSRFAWMTRKSEETITPWNFEEVVDKGASAQSFIERMTNFDKNLPNEKVLPKHSLLYEYFTVYNELTKVKYVTEGMRKPAFLSGEQKKAIVDLLFKTNRKVTVKQLKEDYFKKIECFDSVEISGVEDRFNASLGTYHDLLKIIKDKDFLDNEENEDILEDIVLTLTLFEDREMIEERLKTYAHLFDDKVMKQLKRRRYTGWGRLSRKLINGIRDKQSGKTILDFLKSDGFANRNFMQLIHDDSLTFKEDIQKAQVSGQGDSLHEHIANLAGSPAIKKGILQTVKVVDELVKVMGRHKPENIVIEMARENQTTQKGQKNSRERMKRIEEGIKELGSQILKEHPVENTQLQNEKLYLYYLQNGRDMYVDQELDINRLSDYDVDHIVPQSFLKDDSIDNKVLTRSDKNRGKSDNVPSEEVVKKMKNYWRQLLNAKLITQRKFDNLTKAERGGLSELDKAGFIKRQLVETRQITKHVAQILDSRMNTKYDENDKLIREVKVITLKSKLVSDFRKDFQFYKVREINNYHHAHDAYLNAVVGTALIKKYPKLESEFVYGDYKVYDVRKMIAKSEQEIGKATAKYFFYSNIMNFFKTEITLANGEIRKRPLIETNGETGEIVWDKGRDFATVRKVLSMPQVNIVKKTEVQTGGFSKESILPKRNSDKLIARKKDWDPKKYGGFLWPTVAYSVLVVAKVEKGKSKKLKSVKELLGITIMERSSFEKNPIDFLEAKGYKEVKKDLIIKLPKYSLFELENGRKRMLASAKQLQKGNELALPSKYVNFLYLASHYEKLKGSPEDNEQKQLFVEQHKHYLDEIIEQISEFSKRVILADANLDKVLSAYNKHRDKPIREQAENIIHLFTLTNLGAPAAFKYFDTTIDRKQYRSTKEVLDATLIHQSITGLYETRIDLSQLGGD

SEQ ID NO: 7591 - protein, 1368 aa, unidentified
  source 1..1368: note = SpG(H840A)Nickase
MDKKYSIGLDIGTNSVGWAVITDEYKVPSKKFKVLGNTDRHSIKKNLIGALLFDSGETAEATRLKRTARRRYTRRKNRICYLQEIFSNEMAKVDDSFFHRLEESFLVEEDKKHERHPIFGNIVDEVAYHEKYPTIYHLRKKLVDSTDKADLRLIYLALAHMIKFRGHFLIEGDLNPDNSDVDKLFIQLVQTYNQLFEENPINASGVDAKAILSARLSKSRRLENLIAQLPGEKKNGLFGNLIALSLGLTPNFKSNFDLAEDAKLQLSKDTYDDDLDNLLAQIGDQYADLFLAAKNLSDAILLSDILRVNTEITKAPLSASMIKRYDEHHQDLTLLKALVRQQLPEKYKEIFFDQSKNGYAGYIDGGASQEEFYKFIKPILEKMDGTEELLVKLNREDLLRKQRTFDNGSIPHQIHLGELHAILRRQEDFYPFLKDNREKIEKILTFRIPYYVGPLARGNSRFAWMTRKSEETITPWNFEEVVDKGASAQSFIERMTNFDKNLPNEKVLPKHSLLYEYFTVYNELTKVKYVTEGMRKPAFLSGEQKKAIVDLLFKTNRKVTVKQLKEDYFKKIECFDSVEISGVEDRFNASLGTYHDLLKIIKDKDFLDNEENEDILEDIVLTLTLFEDREMIEERLKTYAHLFDDKVMKQLKRRRYTGWGRLSRKLINGIRDKQSGKTILDFLKSDGFANRNFMQLIHDDSLTFKEDIQKAQVSGQGDSLHEHIANLAGSPAIKKGILQTVKVVDELVKVMGRHKPENIVIEMARENQTTQKGQKNSRERMKRIEEGIKELGSQILKEHPVENTQLQNEKLYLYYLQNGRDMYVDQELDINRLSDYDVDAIVPQSFLKDDSIDNKVLTRSDKNRGKSDNVPSEEVVKKMKNYWRQLLNAKLITQRKFDNLTKAERGGLSELDKAGFIKRQLVETRQITKHVAQILDSRMNTKYDENDKLIREVKVITLKSKLVSDFRKDFQFYKVREINNYHHAHDAYLNAVVGTALIKKYPKLESEFVYGDYKVYDVRKMIAKSEQEIGKATAKYFFYSNIMNFFKTEITLANGEIRKRPLIETNGETGEIVWDKGRDFATVRKVLSMPQVNIVKKTEVQTGGFSKESILPKRNSDKLIARKKDWDPKKYGGFLWPTVAYSVLVVAKVEKGKSKKLKSVKELLGITIMERSSFEKNPIDFLEAKGYKEVKKDLIIKLPKYSLFELENGRKRMLASAKQLQKGNELALPSKYVNFLYLASHYEKLKGSPEDNEQKQLFVEQHKHYLDEIIEQISEFSKRVILADANLDKVLSAYNKHRDKPIREQAENIIHLFTLTNLGAPAAFKYFDTTIDRKQYRSTKEVLDATLIHQSITGLYETRIDLSQLGGD

SEQ ID NO: 7592 - protein, 1367 aa, unidentified
  source 1..1367: note = Met(-) SpG(H839A) Nickase
DKKYSIGLDIGTNSVGWAVITDEYKVPSKKFKVLGNTDRHSIKKNLIGALLFDSGETAEATRLKRTARRRYTRRKNRICYLQEIFSNEMAKVDDSFFHRLEESFLVEEDKKHERHPIFGNIVDEVAYHEKYPTIYHLRKKLVDSTDKADLRLIYLALAHMIKFRGHFLIEGDLNPDNSDVDKLFIQLVQTYNQLFEENPINASGVDAKAILSARLSKSRRLENLIAQLPGEKKNGLFGNLIALSLGLTPNFKSNFDLAEDAKLQLSKDTYDDDLDNLLAQIGDQYADLFLAAKNLSDAILLSDILRVNTEITKAPLSASMIKRYDEHHQDLTLLKALVRQQLPEKYKEIFFDQSKNGYAGYIDGGASQEEFYKFIKPILEKMDGTEELLVKLNREDLLRKQRTFDNGSIPHQIHLGELHAILRRQEDFYPFLKDNREKIEKILTFRIPYYVGPLARGNSRFAWMTRKSEETITPWNFEEVVDKGASAQSFIERMTNFDKNLPNEKVLPKHSLLYEYFTVYNELTKVKYVTEGMRKPAFLSGEQKKAIVDLLFKTNRKVTVKQLKEDYFKKIECFDSVEISGVEDRFNASLGTYHDLLKIIKDKDFLDNEENEDILEDIVLTLTLFEDREMIEERLKTYAHLFDDKVMKQLKRRRYTGWGRLSRKLINGIRDKQSGKTILDFLKSDGFANRNFMQLIHDDSLTFKEDIQKAQVSGQGDSLHEHIANLAGSPAIKKGILQTVKVVDELVKVMGRHKPENIVIEMARENQTTQKGQKNSRERMKRIEEGIKELGSQILKEHPVENTQLQNEKLYLYYLQNGRDMYVDQELDINRLSDYDVDAIVPQSFLKDDSIDNKVLTRSDKNRGKSDNVPSEEVVKKMKNYWRQLLNAKLITQRKFDNLTKAERGGLSELDKAGFIKRQLVETRQITKHVAQILDSRMNTKYDENDKLIREVKVITLKSKLVSDFRKDFQFYKVREINNYHHAHDAYLNAVVGTALIKKYPKLESEFVYGDYKVYDVRKMIAKSEQEIGKATAKYFFYSNIMNFFKTEITLANGEIRKRPLIETNGETGEIVWDKGRDFATVRKVLSMPQVNIVKKTEVQTGGFSKESILPKRNSDKLIARKKDWDPKKYGGFLWPTVAYSVLVVAKVEKGKSKKLKSVKELLGITIMERSSFEKNPIDFLEAKGYKEVKKDLIIKLPKYSLFELENGRKRMLASAKQLQKGNELALPSKYVNFLYLASHYEKLKGSPEDNEQKQLFVEQHKHYLDEIIEQISEFSKRVILADANLDKVLSAYNKHRDKPIREQAENIIHLFTLTNLGAPAAFKYFDTTIDRKQYRSTKEVLDATLIHQSITGLYETRIDLSQLGGD

SEQ ID NO: 7593 - protein, 1367 aa, unidentified
  source 1..1367: note = CAS9 (R221K N394K H840A)
DKKYSIGLDIGTNSVGWAVITDEYKVPSKKFKVLGNTDRHSIKKNLIGALLFDSGETAEATRLKRTARRRYTRRKNRICYLQEIFSNEMAKVDDSFFHRLEESFLVEEDKKHERHPIFGNIVDEVAYHEKYPTIYHLRKKLVDSTDKADLRLIYLALAHMIKFRGHFLIEGDLNPDNSDVDKLFIQLVQTYNQLFEENPINASGVDAKAILSARLSKSRKLENLIAQLPGEKKNGLFGNLIALSLGLTPNFKSNFDLAEDAKLQLSKDTYDDDLDNLLAQIGDQYADLFLAAKNLSDAILLSDILRVNTEITKAPLSASMIKRYDEHHQDLTLLKALVRQQLPEKYKEIFFDQSKNGYAGYIDGGASQEEFYKFIKPILEKMDGTEELLVKLKREDLLRKQRTFDNGSIPHQIHLGELHAILRRQEDFYPFLKDNREKIEKILTFRIPYYVGPLARGNSRFAWMTRKSEETITPWNFEEVVDKGASAQSFIERMTNFDKNLPNEKVLPKHSLLYEYFTVYNELTKVKYVTEGMRKPAFLSGEQKKAIVDLLFKTNRKVTVKQLKEDYFKKIECFDSVEISGVEDRFNASLGTYHDLLKIIKDKDFLDNEENEDILEDIVLTLTLFEDREMIEERLKTYAHLFDDKVMKQLKRRRYTGWGRLSRKLINGIRDKQSGKTILDFLKSDGFANRNFMQLIHDDSLTFKEDIQKAQVSGQGDSLHEHIANLAGSPAIKKGILQTVKVVDELVKVMGRHKPENIVIEMARENQTTQKGQKNSRERMKRIEEGIKELGSQILKEHPVENTQLQNEKLYLYYLQNGRDMYVDQELDINRLSDYDVDAIVPQSFLKDDSIDNKVLTRSDKNRGKSDNVPSEEVVKKMKNYWRQLLNAKLITQRKFDNLTKAERGGLSELDKAGFIKRQLVETRQITKHVAQILDSRMNTKYDENDKLIREVKVITLKSKLVSDFRKDFQFYKVREINNYHHAHDAYLNAVVGTALIKKYPKLESEFVYGDYKVYDVRKMIAKSEQEIGKATAKYFFYSNIMNFFKTEITLANGEIRKRPLIETNGETGEIVWDKGRDFATVRKVLSMPQVNIVKKTEVQTGGFSKESILPKRNSDKLIARKKDWDPKKYGGFDSPTVAYSVLVVAKVEKGKSKKLKSVKELLGITIMERSSFEKNPIDFLEAKGYKEVKKDLIIKLPKYSLFELENGRKRMLASAGELQKGNELALPSKYVNFLYLASHYEKLKGSPEDNEQKQLFVEQHKHYLDEIIEQISEFSKRVILADANLDKVLSAYNKHRDKPIREQAENIIHLFTLTNLGAPAAFKYFDTTIDRKRYTSTKEVLDATLIHQSITGLYETRIDLSQLGGD

SEQ ID NO: 7594 - protein, 34 aa, synthetic construct
  source 1..34: note = SGGSx2-bpSV40NLS-SGGSx2 linker
SGGSSGGSKRTADGSEFESPKKKRKVSGGSSGGS

SEQ ID NO: 7595 - protein, 22 aa, synthetic construct
  source 1..22: note = C-terminal linker-NLS
SGGSKRTADGSEFESPKKKRKV

SEQ ID NO: 7596 - protein, 12 aa, synthetic construct
  source 1..12: note = C-terminal linker-NLS2
GSGPAAKRVKLD

SEQ ID NO: 7597 - protein, 677 aa, unidentified
  source 1..677: note = reference M-MLV RT
TLNIEDEYRLHETSKEPDVSLGSTWLSDFPQAWAETGGMGLAVRQAPLIIPLKATSTPVSIKQYPMSQEARLGIKPHIQRLLDQGILVPCQSPWNTPLLPVKKPGTNDYRPVQDLREVNKRVEDIHPTVPNPYNLLSGLPPSHQWYTVLDLKDAFFCLRLHPTSQPLFAFEWRDPEMGISGQLTWTRLPQGFKNSPTLFDEALHRDLADFRIQHPDLILLQYVDDLLLAATSELDCQQGTRALLQTLGNLGYRASAKKAQICQKQVKYLGYLLKEGQRWLTEARKETVMGQPTPKTPRQLREFLGTAGFCRLWIPGFAEMAAPLYPLTKTGTLFNWGPDQQKAYQEIKQALLTAPALGLPDLTKPFELFVDEKQGYAKGVLTQKLGPWRRPVAYLSKKLDPVAAGWPPCLRMVAAIAVLTKDAGKLTMGQPLVILAPHAVEALVKQPPDRWLSNARMTHYQALLLDTDRVQFGPVVALNPATLLPLPEEGLQHNCLDILAEAHGTRPDLTDQPLPDADHTWYTDGSSLLQEGQRKAGAAVTTETEVIWAKALPAGTSAQRAELIALTQALKMAEGKKLNVYTDSRYAFATAHIHGEIYRRRGLLTSEGKEIKNKDEILALLKALFLPKRLSIIHCPGHQKGHSAEARGNRMADQAARKAAITETPDTSTLLIENSSP

SEQ ID NO: 7598 - protein, 5202 aa, unidentified
  source 1..5202: note = wild type usherin polypeptide
MNCPVLSLGSGFLFQVIEMLIFAYFASISLTESRGLFPRLENVGAFKKVSIVPTQAVCGLPDRSTFCHSSAAAESIQFCTQRFCIQDCPYRSSHPTYTALFSAGLSSCITPDKNDLHPNAHSNSASFIFGNHKSCFSSPPSPKLMASFTLAVWLKPEQQGVMCVIEKTVDGQIVFKLTISEKETMFYYRTVNGLQPPIKVMTLGRILVKKWIHLSVQVHQTKISFFINGVEKDHTPFNARTLSGSITDFASGTVQIGQSLNGLEQFVGRMQDFRLYQVALTNREILEVFSGDLLRLHAQSHCRCPGSHPRVHPLAQRYCIPNDAGDTADNRVSRLNPEAHPLSFVNDNDVGTSWVSNVFTNITQLNQGVTISVDLENGQYQVFYIIIQFFSPQPTEIRIQRKKENSLDWEDWQYFARNCGAFGMKNNGDLEKPDSVNCLQLSNFTPYSRGNVTFSILTPGPNYRPGYNNFYNTPSLQEFVKATQIRFHFHGQYYTTETAVNLRHRYYAVDEITISGRCQCHGHADNCDTTSQPYRCLCSQESFTEGLHCDRCLPLYNDKPFRQGDQVYAFNCKPCQCNSHSKSCHYNISVDPFPFEHFRGGGGVCDDCEHNTTGRNCELCKDYFFRQVGADPSAIDVCKPCDCDTVGTRNGSILCDQIGGQCNCKRHVSGRQCNQCQNGFYNLQELDPDGCSPCNCNTSGTVDGDITCHQNSGQCKCKANVIGLRCDHCNFGFKFLRSFNDVGCEPCQCNLHGSVNKFCNPHSGQCECKKEAKGLQCDTCRENFYGLDVTNCKACDCDTAGSLPGTVCNAKTGQCICKPNVEGRQCNKCLEGNFYLRQNNSFLCLPCNCDKTGTINGSLLCNKSTGQCPCKLGVTGLRCNQCEPHRYNLTIDNFQHCQMCECDSLGTLPGTICDPISGQCLCVPNRQGRRCNQCQPGFYISPGNATGCLPCSCHTTGAVNHICNSLTGQCVCQDASIAGQRCDQCKDHYFGFDPQTGRCQPCNCHLSGALNETCHLVTGQCFCKQFVTGSKCDACVPSASHLDVNNLLGCSKTPFQQPPPRGQVQSSSAINLSWSPPDSPNAHWLTYSLLRDGFEIYTTEDQYPYSIQYFLDTDLLPYTKYSYYIETTNVHGSTRSVAVTYKTKPGVPEGNLTLSYIIPIGSDSVTLTWTTLSNQSGPIEKYILSCAPLAGGQPCVSYEGHETSATIWNLVPFAKYDFSVQACTSGGCLHSLPITVTTAQAPPQRLSPPKMQKISSTELHVEWSPPAELNGIIIRYELYMRRLRSTKETTSEESRVFQSSGWLSPHSFVESANENALKPPQTMTTITGLEPYTKYEFRVLAVNMAGSVSSAWVSERTGESAPVFMIPPSVFPLSSYSLNISWEKPADNVTRGKVVGYDINMLSEQSPQQSIPMAFSQLLHTAKSQELSYTVEGLKPYRIYEFTITLCNSVGCVTSASGAGQTLAAAPAQLRPPLVKGINSTTIHLRWFPPEELNGPSPIYQLERRESSLPALMTTMMKGIRFIGNGYCKFPSSTHPVNTDFTGIKASFRTKVPEGLIVFAASPGNQEEYFALQLKKGRLYFLFDPQGSPVEVTTTNDHGKQYSDGKWHEIIAIRHQAFGQITLDGIYTGSSAILNGSTVIGDNTGVFLGGLPRSYTILRKDPEIIQKGFVGCLKDVHFMKNYNPSAIWEPLDWQSSEEQINVYNSWEGCPASLNEGAQFLGAGFLELHPYMFHGGMNFEISFKFRTDQLNGLLLFVYNKDGPDFLAMELKSGILTFRLNTSLAFTQVDLLLGLSYCNGKWNKVIIKKEGSFISASVNGLMKHASESGDQPLVVNSPVYVGGIPQELLNSYQHLCLEQGFGGCMKDVKFTRGAVVNLASVSSGAVRVNLDGCLSTDSAVNCRGNDSILVYQGKEQSVYEGGLQPFTEYLYRVIASHEGGSVYSDWSRGRTTGAAPQSVPTPSRVRSLNGYSIEVTWDEPVVRGVIEKYILKAYSEDSTRPPRMPSASAEFVNTSNLTGILTGLLPFKNYAVTLTACTLAGCTESSHALNISTPQEAPQEVQPPVAKSLPSSLLLSWNPPKKANGIITQYCLYMDGRLIYSGSEENYIVTDLAVFTPHQFLLSACTHVGCTNSSWVLLYTAQLPPEHVDSPVLTVLDSRTIHIQWKQPRKISGILERYVLYMSNHTHDFTIWSVIYNSTELFQDHMLQYVLPGNKYLIKLGACTGGGCTVSEASEALTDEDIPEGVPAPKAHSYSPDSFNVSWTEPEYPNGVITSYGLYLDGILIHNSSELSYRAYGFAPWSLHSFRVQACTAKGCALGPLVENRTLEAPPEGTVNVFVKTQGSRKAHVRWEAPFRPNGLLTHSVLFTGIFYVDPVGNNYTLLNVTKVMYSGEETNLWVLIDGLVPFTNYTVQVNISNSQGSLITDPITIAMPPGAPDGVLPPRLSSATPTSLQVVWSTPARNNAPGSPRYQLQMRSGDSTHGFLELFSNPSASLSYEVSDLQPYTEYMFRLVASNGFGSAHSSWIPFMTAEDKPGPVVPPILLDVKSRMMLVTWQHPRKSNGVITHYNIYLHGRLYLRTPGNVTNCTVMHLHPYTAYKFQVEACTSKGCSLSPESQTVWTLPGAPEGIPSPELFSDTPTSVIISWQPPTHPNGLVENFTIERRVKGKEEVTTLVTLPRSHSMRFIDKTSALSPWTKYEYRVLMSTLHGGTNSSAWVEVTTRPSRPAGVQPPVVTVLEPDAVQVTWKPPLIQNGDILSYEIHMPDPHITLTNVTSAVLSQKVTHLIPFTNYSVTIVACSGGNGYLGGCTESLPTYVTTHPTVPQNVGPLSVIPLSESYVVISWQPPSKPNGPNLRYELLRRKIQQPLASNPPEDLNRWHNIYSGTQWLYEDKGLSRFTTYEYMLFVHNSVGFTPSREVTVTTLAGLPERGANLTASVLNHTAIDVRWAKPTVQDLQGEVEYYTLFWSSATSNDSLKILPDVNSHVIGHLKPNTEYWIFISVFNGVHSINSAGLHATTCDGEPQGMLPPEVVIINSTAVRVIWTSPSNPNGVVTEYSIYVNNKLYKTGMNVPGSFILRDLSPFTIYDIQVEVCTIYACVKSNGTQITTVEDTPSDIPTPTIRGITSRSLQIDWVSPRKPNGIILGYDLLWKTWYPCAKTQKLVQDQSDELCKAVRCQKPESICGHICYSSEAKVCCNGVLYNPKPGHRCCEEKYIPFVLNSTGVCCGGRIQEAQPNHQCCSGYYARILPGEVCCPDEQHNRVSVGIGDSCCGRMPYSTSGNQICCAGRLHDGHGQKCCGRQIVSNDLECCGGEEGVVYNRLPGMFCCGQDYVNMSDTICCSASSGESKAHIKKNDPVPVKCCETELIPKSQKCCNGVGYNPLKYVCSDKISTGMMMKETKECRILCPASMEATEHCGRCDFNFTSHICTVIRGSHNSTGKASIEEMCSSAEETIHTGSVNTYSYTDVNLKPYMTYEYRISAWNSYGRGLSKAVRARTKEDVPQGVSPPTWTKIDNLEDTIVLNWRKPIQSNGPIIYYILLRNGIERFRGTSLSFSDKEGIQPFQEYSYQLKACTVAGCATSSKVVAATTQGVPESILPPSITALSAVALHLSWSVPEKSNGVIKEYQIRQVGKGLIHTDTTDRRQHTVTGLQPYTNYSFTLTACTSAGCTSSEPFLGQTLQAAPEGVWVTPRHIIINSTTVELYWSLPEKPNGLVSQYQLSRNGNLLFLGGSEEQNFTDKNLEPNSRYTYKLEVKTGGGSSASDDYIVQTPMSTPEEIYPPYNITVIGPYSIFVAWIPPGILIPEIPVEYNVLLNDGSVTPLAFSVGHHQSTLLENLTPFTQYEIRIQACQNGSCGVSSRMFVKTPEAAPMDLNSPVLKALGSACIEIKWMPPEKPNGIIINYFIYRRPAGIEEESVLFVWSEGALEFMDEGDTLRPFTLYEYRVRACNSKGSVESLWSLTQTLEAPPQDFPAPWAQATSAHSVLLNWTKPESPNGIISHYRVVYQERPDDPTFNSPTVHAFTVKGTSHQAHLYGLEPFTTYRIGVVAANHAGEILSPWTLIQTLESSPSGLRNFIVEQKENGRALLLQWSEPMRTNGVIKTYNIFSDGFLEYSGLNRQFLFRRLDPFTLYTLTLEACTRAGCAHSAPQPLWTDEAPPDSQLAPTVHSVKSTSVELSWSEPVNPNGKIIRYEVIRRCFEGKAWGNQTIQADEKIVFTEYNTERNTFMYNDTGLQPWTQCEYKIYTWNSAGHTCSSWNVVRTLQAPPEGLSPPVISYVSMNPQKLLISWIPPEQSNGIIQSYRLQRNEMLYPFSFDPVTFNYTDEELLPFSTYSYALQACTSGGCSTSKPTSITTLEAAPSEVSPPDLWAVSATQMNVCWSPPTVQNGKITKYLVRYDNKESLAGQGLCLLVSHLQPYSQYNFSLVACTNGGCTASVSKSAWTMEALPENMDSPTLQVTGSESIEITWKPPRNPNGQIRSYELRRDGTIVYTGLETRYRDFTLTPGVEYSYTVTASNSQGGILSPLVKDRTSPSAPSGMEPPKLQARGPQEILVNWDPPVRTNGDIINYTLFIRELFERETKIIHINTTHNSFGMQSYIVNQLKPFHRYEIRIQACTTLGCASSDWTFIQTPEIAPLMQPPPHLEVQMAPGGFQPTVSLLWTGPLQPNGKVLYYELYRRQIATQPRKSNPVLIYNGSSTSFIDSELLPFTEYEYQVWAVNSAGKAPSSWTWCRTGPAPPEGLRAPTFHVISSTQAVVNISAPGKPNGIVSLYRLFSSSAHGAETVLSEGMATQQTLHGLQAFTNYSIGVEACTCFNCCSKGPTAELRTHPAPPSGLSSPQIGTLASRTASFRWSPPMFPNGVIHSYELQFHVACPPDSALPCTPSQIETKYTGLGQKASLGGLQPYTTYKLRVVAHNEVGSTASEWISFTTQKELPQYRAPFSVDSNLSVVCVNWSDTFLLNGQLKEYVLTDGGRRVYSGLDTTLYIPRTADKTFFFQVICTTDEGSVKTPLIQYDTSTGLGLVLTTPGKKKGSRSKSTEFYSELWFIVLMAMLGLILLAIFLSLILQRKIHKEPYIRERPPLVPLQKRMSPLNVYPPGENHMGLADTKIPRSGTPVSIRSNRSACVLRIPSQNQTSLTYSQGSLHRSVSQLMDIQDKKVLMDNSLWEAIMGHNSGLYVDEEDLMNAIKDFSSVTKERTTFTDTHL

SEQ ID NO: 7599 - protein, 677 aa, unidentified
  source 1..677: note = reference M-MLV RT
TLNIEDEHRLHETSKEPDVSLGSTWLSDFPQAWAETGGMGLAVRQAPLIIPLKATSTPVSIKQYPMSQEARLGIKPHIQRLLDQGILVPCQSPWNTPLLPVKKPGTNDYRPVQDLREVNKRVEDIHPTVPNPYNLLSGLPPSHQWYTVLDLKDAFFCLRLHPTSQPLFAFEWRDPEMGISGQLTWTRLPQGFKNSPTLFDEALHRDLADFRIQHPDLILLQYVDDLLLAATSELDCQQGTRALLQTLGNLGYRASAKKAQICQKQVKYLGYLLKEGQRWLTEARKETVMGQPTPKTPRQLREFLGTAGFCRLWIPGFAEMAAPLYPLTKTGTLFNWGPDQQKAYQEIKQALLTAPALGLPDLTKPFELFVDEKQGYAKGVLTQKLGPWRRPVAYLSKKLDPVAAGWPPCLRMVAAIAVLTKDAGKLTMGQPLVILAPHAVEALVKQPPDRWLSNARMTHYQALLLDTDRVQFGPVVALNPATLLPLPEEGLQHNCLDILAEAHGTRPDLTDQPLPDADHTWYTDGSSLLQEGQRKAGAAVTTETEVIWAKALPAGTSAQRAELIALTQALKMAEGKKLNVYTDSRYAFATAHIHGEIYRRRGLLTSEGKEIKNKDEILALLKALFLPKRLSIIHCPGHQKGHSAEARGNRMADQAARKAAITETPDTSTLLIENSSP

SEQ ID NO: 7600 - protein, 18 aa, synthetic construct
KRTADGSEFESPKKKRKV

SEQ ID NO: 7601 - protein, 16 aa, synthetic construct
  source 1..16: note = a nucleoplasmin NLS sequence
KRPAATKKAGQAKKKK

SEQ ID NO: 7602 - protein, 33 aa, synthetic construct
GCCAACATGAGGATCACCCATGTCTGCAGGGCC

SEQ ID NO: 7603 - protein, 131 aa, synthetic construct
GSASNFTQFVLVDNGGTGDVTVAPSNFANGVAEWISSNSRSQAYKVTCSVRQSSAQNRKYTIKVEVPKVATQTVGGEELPVAGWRSYLNMELTIPIFATNSDCELIVKAMQGLLKDGNPIPSAIAANSGIY

SEQ ID NO: 7604 - protein, 16 aa, synthetic construct
SGSETPGTSESATPES

SEQ ID NO: 7605 - protein, 10 aa, synthetic construct
SGGSGGSGGS

SEQ ID NO: 7606 - protein, 60 aa, synthetic construct
SGGSSGGSSGSETPGTSESATPESAGSYPYDVPDYAGSAAPAAKKKKLDGSGSGGSSGGS

SEQ ID NO: 7607 - protein, 16 aa, synthetic construct
RQIKIWFQNRRMKWKK

SEQ ID NO: 7608 - protein, 1546 aa, unidentified
  source 1..1546: note = Wild-type Usherin Protein, isoform A
MNCPVLSLGSGFLFQVIEMLIFAYFASISLTESRGLFPRLENVGAFKKVSIVPTQAVCGLPDRSTFCHSSAAAESIQFCTQRFCIQDCPYRSSHPTYTALFSAGLSSCITPDKNDLHPNAHSNSASFIFGNHKSCFSSPPSPKLMASFTLAVWLKPEQQGVMCVIEKTVDGQIVFKLTISEKETMFYYRTVNGLQPPIKVMTLGRILVKKWIHLSVQVHQTKISFFINGVEKDHTPFNARTLSGSITDFASGTVQIGQSLNGLEQFVGRMQDFRLYQVALTNREILEVFSGDLLRLHAQSHCRCPGSHPRVHPLAQRYCIPNDAGDTADNRVSRLNPEAHPLSFVNDNDVGTSWVSNVFTNITQLNQGVTISVDLENGQYQVFYIIIQFFSPQPTEIRIQRKKENSLDWEDWQYFARNCGAFGMKNNGDLEKPDSVNCLQLSNFTPYSRGNVTFSILTPGPNYRPGYNNFYNTPSLQEFVKATQIRFHFHGQYYTTETAVNLRHRYYAVDEITISGRCQCHGHADNCDTTSQPYRCLCSQESFTEGLHCDRCLPLYNDKPFRQGDQVYAFNCKPCQCNSHSKSCHYNISVDPFPFEHFRGGGGVCDDCEHNTTGRNCELCKDYFFRQVGADPSAIDVCKPCDCDTVGTRNGSILCDQIGGQCNCKRHVSGRQCNQCQNGFYNLQELDPDGCSPCNCNTSGTVDGDITCHQNSGQCKCKANVIGLRCDHCNFGFKFLRSFNDVGCEPCQCNLHGSVNKFCNPHSGQCECKKEAKGLQCDTCRENFYGLDVTNCKACDCDTAGSLPGTVCNAKTGQCICKPNVEGRQCNKCLEGNFYLRQNNSFLCLPCNCDKTGTINGSLLCNKSTGQCPCKLGVTGLRCNQCEPHRYNLTIDNFQHCQMCECDSLGTLPGTICDPISGQCLCVPNRQGRRCNQCQPGFYISPGNATGCLPCSCHTTGAVNHICNSLTGQCVCQDASIAGQRCDQCKDHYFGFDPQTGRCQPCNCHLSGALNETCHLVTGQCFCKQFVTGSKCDACVPSASHLDVNNLLGCSKTPFQQPPPRGQVQSSSAINLSWSPPDSPNAHWLTYSLLRDGFEIYTTEDQYPYSIQYFLDTDLLPYTKYSYYIETTNVHGSTRSVAVTYKTKPGVPEGNLTLSYIIPIGSDSVTLTWTTLSNQSGPIEKYILSCAPLAGGQPCVSYEGHETSATIWNLVPFAKYDFSVQACTSGGCLHSLPITVTTAQAPPQRLSPPKMQKISSTELHVEWSPPAELNGIIIRYELYMRRLRSTKETTSEESRVFQSSGWLSPHSFVESANENALKPPQTMTTITGLEPYTKYEFRVLAVNMAGSVSSAWVSERTGESAPVFMIPPSVFPLSSYSLNISWEKPADNVTRGKVVGYDINMLSEQSPQQSIPMAFSQLLHTAKSQELSYTVEGLKPYRIYEFTITLCNSVGCVTSASGAGQTLAAAPAQLRPPLVKGINSTTIHLRWFPPEELNGPSPIYQLERRESSLPALMTTMMKGIRFIGNGYCKFPSSTHPVNTDFTGKCV

SEQ ID NO: 7609 - protein, 32 aa, synthetic construct
SGGSSGGSSGSETPGTSESATPESSGGSSGGS

SEQ ID NO: 7610 - protein, 4 aa, synthetic construct
SGGS

SEQ ID NO: 7611 - protein, 6 aa, synthetic construct
GGSGGS

SEQ ID NO: 7612 - protein, 9 aa, synthetic construct
GGSGGSGGS

SEQ ID NO: 7613 - skipped

SEQ ID NO: 7614 - protein, 150 aa, synthetic construct
  VARIANT 1..150: note = (EAAAK)n repeats. 1 to 29 EAAAK repeats may be absent.
EAAAKEAAAKEAAAKEAAAKEAAAKEAAAKEAAAKEAAAKEAAAKEAAAKEAAAKEAAAKEAAAKEAAAKEAAAKEAAAKEAAAKEAAAKEAAAKEAAAKEAAAKEAAAKEAAAKEAAAKEAAAKEAAAKEAAAKEAAAKEAAAKEAAAK

SEQ ID NO: 7615 - protein, 90 aa, synthetic construct
  VARIANT 1..90: note = (GGS)n repeats. 1 to 29 GGS repeats can be absent.
GGSGGSGGSGGSGGSGGSGGSGGSGGSGGSGGSGGSGGSGGSGGSGGSGGSGGSGGSGGSGGSGGSGGSGGSGGSGGSGGSGGSGGSGGS

SEQ ID NO: 7616 - protein, 120 aa, synthetic construct
  VARIANT 1..120: note = (SGGS)n repeats. 1 to 29 SGGS repeats may be absent.
SGGSSGGSSGGSSGGSSGGSSGGSSGGSSGGSSGGSSGGSSGGSSGGSSGGSSGGSSGGSSGGSSGGSSGGSSGGSSGGSSGGSSGGSSGGSSGGSSGGSSGGSSGGSSGGSSGGSSGGS

SEQ ID NO: 7617 - skipped

SEQ ID NO: 7618 - protein, 21 aa, synthetic construct
  VARIANT 1..21: note = (GGS)n repeats. 4 GGS repeats or 6GGS can be absent.
GGSGGSGGSGGSGGSGGSGGS

SEQ ID NO: 7619 - protein, 7 aa, synthetic construct
  source 1..7: note = NLS of SV40 Large T-AG
PKKKRKV

SEQ ID NO: 7620 - protein, 9 aa, synthetic construct
  source 1..9: note = NLS of C-Myc
PAAKRVKLD

SEQ ID NO: 7621 - protein, 9 aa, synthetic construct
  source 1..9: note = NLS of Tus-protein
KLKIKRPVK

SEQ ID NO: 7622 - protein, 8 aa, synthetic construct
  source 1..8: note = NLS of polyoma large T-AG
VSRKRPRP

SEQ ID NO: 7623 - protein, 9 aa, synthetic construct
RRRRRRRRR

SEQ ID NO: 7624 - protein, 8 aa, synthetic construct
RRRRRRRR

SEQ ID NO: 7625 - protein, 180 aa, synthetic construct
  VARIANT 1..180: note = (GGGGS)n repeats. 1 to 29 GGGGS repeats may be absent.
GGGGSNGGGGSNGGGGSNGGGGSNGGGGSNGGGGSNGGGGSNGGGGSNGGGGSNGGGGSNGGGGSNGGGGSNGGGGSNGGGGSNGGGGSNGGGGSNGGGGSNGGGGSNGGGGSNGGGGSNGGGGSNGGGGSNGGGGSNGGGGSNGGGGSNGGGGSNGGGGSNGGGGSNGGGGSNGGGGSN
